(19) United States
(12) Patent Application Publication
(10) Pub. No.: US 2023/0183687 A1
(43) Pub. Date: Jun. 15, 2023

(54) MODIFIED GUIDE RNAS FOR NEISSERIA MENINGITIDIS CAS9

(71) Applicant: UNIVERSITY OF MASSACHUSETTS, Boston, MA (US)

(72) Inventors: Erik Joseph Sontheimer, Auburndale, MA (US); Jonathan Kenneth Watts, Worcester, MA (US); Anastasia Khvorova, Westborough, MA (US); Nathan Bamidele, Shrewsbury, MA (US)

(21) Appl. No.: 17/964,611

(22) Filed: Oct. 12, 2022

Related U.S. Application Data
(60) Provisional application No. 63/255,315, filed on Oct. 13, 2021.

(51) Int. Cl. C12N 15/11; C12N 9/22; C12N 15/90

(52) U.S. Cl. CPC C12N 15/11; C12N 15/111; C12N 9/22; C12N 15/907; C12N 2310/20; C12N 2800/80; C12N 2310/314

(57) ABSTRACT

Chemically modified Neisseria meningitidis (Nme) crRNAs, tracrRNAs, and sgRNAs are provided. Methods of using the Nme crRNAs, tracrRNAs, and sgRNAs for genome editing with a Nme CRISPR nuclease and kits for performing the same are also provided.

### RELATED APPLICATIONS

[0001] This application claims the benefit of U.S. Provisional Application No. 63/255,315, filed Oct. 13, 2021, the content of which is incorporated by reference in its entirety for all purposes.

### STATEMENT REGARDING FEDERALLY SPONSORED RESEARCH OR DEVELOPMENT

[0002] This invention was made with government support under Grant Nos. TR002668, GM113686, and GM143879 awarded by the National Institutes of Health. The Government has certain rights in the invention.

### SEQUENCE LISTING

[0003] The content of the electronically submitted Sequence Listing in XML format (Name: 734838_UM9-272_ST26.xml; Size: 9,253,628 bytes; and Date of Creation: Feb. 27, 2023) is incorporated herein by reference in its entirety.

### FIELD OF THE INVENTION

[0004] This disclosure relates to compositions and methods of modified guide RNAs for CRISPR genome editing.

### BACKGROUND

[0005] The versatility of Cas9 for genome editing derives from its RNA-guided nature. Existing guide RNAs suffer from several limitations, which limit their utility in therapeutic applications. For example, existing guide RNAs may be subject to rapid degradation in circulation and within cells. Moreover, chemical modifications of guide RNAs may reduce stability and editing efficiency. Accordingly, there exists a need in the art for optimized guide RNAs that retain efficient genome editing activity in vivo and ex vivo when paired with a CRISPR nuclease, such as Cas9.

### SUMMARY

[0006] The present disclosure provides chemically modified guide RNAs for Neisseria meningitidis (Nme) Cas9-mediated CRISPR genome editing. In certain embodiments, the guide RNAs of the disclosure are heavily or fully chemically modified. The guide RNA of the disclosure may confer several advantages in vivo or ex vivo, including stability, improved potency, and/or reduced off-target effects. Furthermore, in certain embodiments, the modified RNAs of the disclosure have reduced immunogenicity, e.g., a reduced ability to induce innate immune responses.

[0007] In certain aspects, the disclosure provides a chemically modified Neisseria meningitidis (Nme) guide RNA (gRNA) comprising: (a) a crRNA portion comprising (i) a guide sequence capable of hybridizing to a target polynucleotide sequence, and (ii) a repeat sequence; and (b) a tracrRNA portion comprising an anti-repeat nucleotide sequence that is complementary to the repeat sequence, wherein the crRNA portion comprises at least 40% modified nucleotides, and wherein the gRNA is capable of binding to an Nme Cas9 nuclease or a variant thereof.

[0008] In certain embodiments, the Nme Cas9 nuclease is Nme1Cas9, Nme2Cas9, or Nme3Cas9. In certain embodiments, the gRNA is capable of binding to an Nme Cas9 nuclease or variant thereof comprising an amino acid sequence with at least 80% identity to an amino acid sequence set forth in SEQ ID NO: 1, 2, or 3. In certain embodiments, the crRNA portion binds to an Nme Cas9 nuclease or variant thereof through one or more nucleobases at positions 2, 11, 12, 14, 17, 20, 34, 35, and 36 from the 5′ end of the crRNA portion. In certain embodiments, the repeat sequence of the crRNA portion binds to an Nme Cas9 nuclease or variant thereof through one or more nucleobases at positions 10, 11, and 12 from the 5′ end of the repeat sequence of the crRNA portion. In certain embodiments, the guide sequence of the crRNA portion binds to an Nme Cas9 nuclease or variant thereof through one or more nucleobases at positions 5, 8, 11, 13, 14, and 23 from the 3′ end of the guide sequence of the crRNA portion.

[0009] In certain embodiments, the tracrRNA portion comprises at least one modified nucleotide.

[0010] In certain embodiments, the modified nucleotides each independently comprise a modification of a ribose group, a phosphate group, a nucleobase, or a combination thereof.

[0011] In certain embodiments, each modification of the ribose group is independently selected from the group consisting of 2′-O-methyl, 2′-fluoro, 2′-deoxy, 2′-O-(2-methoxyethyl) (MOE), 2′-NH₂ (2′-amino), 4′-thio, a bicyclic nucleotide, a locked nucleic acid (LNA), a 2′-(S)-constrained ethyl (S-cEt), a constrained MOE, and a 2′-O,4′-C-aminomethylene bridged nucleic acid (2′,4′-BNA^{NC}).

[0012] In certain embodiments, at least 50% of the ribose groups are chemically modified. In certain embodiments, at least 40% of the ribose groups in the guide sequence of the crRNA portion are chemically modified. In certain embodiments, at least 40% of the ribose groups in the repeat sequence of the crRNA portion are chemically modified. In certain embodiments, at least 80% of the ribose groups are chemically modified. In certain embodiments, at least 80% of the ribose groups in the guide sequence of the crRNA portion are chemically modified. In certain embodiments, at least 90% of the ribose groups are chemically modified. In certain embodiments, at least 90% of the ribose groups in the guide sequence of the crRNA portion are chemically modified. In certain embodiments, 100% of the ribose groups are chemically modified. In certain embodiments, 100% of the ribose groups in the guide sequence of the crRNA portion are chemically modified.

[0013] In certain embodiments, each modification of the phosphate group is independently selected from the group consisting of a phosphorothioate, phosphonoacetate (PACE), thiophosphonoacetate (thioPACE), amide, triazole, phosphonate, and phosphotriester modification.

[0014] In certain embodiments, each modification of the nucleobase group is independently selected from the group consisting of 2-thiouridine, 4-thiouridine, N⁶-methyladenosine, pseudouridine, 2,6-diaminopurine, inosine, thymidine, 5-methylcytosine, 5-substituted pyrimidine, isoguanine, isocytosine, and halogenated aromatic groups.

[0015] In certain embodiments, the gRNA comprises at least 90% modified nucleotides. In certain embodiments, the gRNA 100% modified nucleotides.

[0016] In certain embodiments, at least one nucleotide of the crRNA portion comprises a 2′-deoxy chemical modification. In certain embodiments, one or more of the nucleotides at positions 7, 26, 33, 34, 35, 36, and 37 from the 5′ end of the crRNA portion comprises a 2′-deoxy chemical modification. In certain embodiments, one or more of the nucleotides at positions 12, 15, 16, 23, and 42 from the 3′ end of the crRNA portion comprises a 2′-deoxy chemical modification. In certain embodiments, the nucleotide at position 7 from the 5′ end of the guide sequence of the crRNA portion comprises a 2′-deoxy chemical modification. In certain embodiments, the nucleotide at position 18 from the 3′ end of the guide sequence of the crRNA portion comprises a 2′-deoxy chemical modification. In certain embodiments, the nucleotides at positions 2, 9, 10, 11, 12. and 13 from the 5′ end of the repeat sequence of the crRNA portion comprises a 2′-deoxy chemical modification.

[0017] In certain embodiments, at least one nucleotide of the crRNA portion comprises a 2′-fluoro chemical modification. In certain embodiments, one or more of the nucleotides at positions 12, 14, 16, 19, 20, and 21 from the 5′ end of the crRNA portion comprises a 2′-fluoro chemical modification. In certain embodiments, one or more of the nucleotides at positions 28, 29, 30, 33, 35, and 37 from the 3′ end of the crRNA portion comprises a 2′-fluoro chemical modification. In certain embodiments, one or more of the nucleotides at positions 4, 6, 9, 11, and 13 from the 3′ end of the guide sequence of the crRNA portion comprises a 2′-fluoro chemical modification. In certain embodiments, one or more of the nucleotides at positions 1, 5, 6, 7, and 8 from the 5′ end of the repeat sequence of the crRNA portion comprise a 2′-fluoro chemical modification. In certain embodiments, the nucleotides at positions 33 and 35 from the 3′ end of the crRNA portion comprises a 2′-fluoro chemical modification and position 42 from the 3′ end of the crRNA portion comprises a 2′-deoxy chemical modification. In certain embodiments, the nucleotides at positions 9 and 11 from the 3′ end of the guide sequence of the crRNA portion comprises a 2′-fluoro chemical modification and position 18 from the 3′ end of the guide sequence of the crRNA portion comprises a 2′-deoxy chemical modification.

[0018] In certain embodiments, the guide sequence of the crRNA portion is between 18 and 26 nucleotides in length. In certain embodiments, the repeat sequence of the crRNA portion is between 12 and 24 nucleotides in length. In certain embodiments, the repeat sequence of the crRNA portion is 12, 18, or 24 nucleotides in length. In certain embodiments, the crRNA portion is between 32 and 48 nucleotides in length.

[0019] In certain embodiments, the tracrRNA portion is between 60 and 100 nucleotides in length.

[0020] In certain embodiments, the chemically modified Nme gRNA comprises at least one chemical modification in a crRNA portion nucleotide sequence of: (N)ₓ GUUGUAGCUCCCUUUCUC (SEQ ID NO: 8) (CR42); or (N)ₓ GUUGUAGCUCCCUUUCUCAUUUCG (SEQ ID NO: 9) (CR48), wherein N corresponds to any nucleotide and x corresponds to any integer between 18 and 26.

[0021] In certain embodiments, the chemically modified Nme gRNA comprises a crRNA portion modification pattern selected from the group consisting of:

| | |
|---|---|
| CR48-2 | (mN)#(mN)#(mN)#(mN)(mN)(rN)(rN)(rN)(rN)(rN)(rN)(rN)(rN)(rN)(rN)(rN)(rN)(r |
| | N)(rN)(rN)(rN)(rN)(rN)(rN)(rG)(rU)(rU)(rG)(rU)(rA)(rG)(rC)(rU)(rC)(rC)(rC)(rU) |
| | (mU)(mU)(mC)(mU)(mC)(mA)(mU)(mU)#(mU)#(mC)#(mG) (SEQ ID NO: 13); |
| CR48-154 | (mN)#(mN)#(mN)#(mN)(mN)(mN)(dN)#(mN)(mN)(mN)(mN)(fN)(mN)(fN)(mN)( |
| | fN)(mN)(mN)(rN)(rN)(rN)(mN)(rN)(rN)(mG)(rU)(rU)(rG)(mU)(mA)(mG)(mC)(r |
| | U)(rC)(rC)(rC)(rU)(mU)(mU)(mC)(mU)(mC)(mA)(mU)(mU)#(mU)#(mC)#(mG) |
| | (SEQ ID NO: 14); |
| CR48-155 | (mN)#(mN)#(mN)#(mN)(mN)(mN)(dN)#(mN)(mN)(mN)(mN)(mN)(mN)(fN)(mN) |
| | (fN)(mN)(mN)(rN)(rN)(rN)(mN)(rN)(rN)(mG)(rU)(rU)(rG)(mU)(mA)(mG)(mC)(r |
| | U)(rC)(rC)(rC)(rU)(mU)(mU)(mC)(mU)(mC)(mA)(mU)(mU)#(mU)#(mC)#(mG) |
| | (SEQ ID NO: 15); |
| CR48-190 | (mN)#(mN)#(mN)#(mN)(mN)(mN)(dN)#(mN)(mN)(mN)(mN)(fN)(mN)(fN)(mN)( |
| | fN)(mN)(mN)(rN)(fN)(mN)(mN)(mN)(mN)(mG)(rU)(rU)(rG)(mU)(mA)(mG)(mC) |
| | (rU)(rC)(rC)(rC)(rU)(mU)(mU)(mC)(mU)(mC)(mA)(mU)(mU)#(mU)#(mC)#(mG) |
| | (SEQ ID NO: 16); |
| CR48-191 | (mN)#(mN)#(mN)#(mN)(mN)(mN)(dN)#(mN)(mN)(mN)(mN)(fN)(mN)(fN)(mN)( |
| | fN)(mN)(mN)(rN)(mN)(fN)(mN)(mN)(mN)(mG)(rU)(rU)(rG)(mU)(mA)(mG)(mC) |
| | (rU)(rC)(rC)(rC)(rU)(mU)(mU)(mC)(mU)(mC)(mA)(mU)(mU)#(mU)#(mC)#(mG) |
| | (SEQ ID NO: 17); |
| CR48-192 | (mN)#(mN)#(mN)#(mN)(mN)(mN)(dN)#(mN)(mN)(mN)(mN)(mN)(mN)(fN)(mN) |
| | (fN)(mN)(mN)(rN)(fN)(mN)(mN)(mN)(mN)(mG)(rU)(rU)(rG)(mU)(mA)(mG)(nC |
| | )(rU)(rC)(rC)(rC)(rU)(mU)(mU)(mC)(mU)(mC)(mA)(mU)(mU)#(mU)#(mC)#(mG |
| | ) (SEQ ID NO: 18); |
| CR48-193 | (mN)#(mN)#(mN)#(mN)(mN)(mN)(dN)#(mN)(mN)(mN)(mN)(mN)(mN)(fN)(mN) |
| | (fN)(mN)(mN)(rN)(mN)(fN)(mN)(mN)(mN)(mG)(rU)(rU)(rG)(mU)(mA)(mG)(mC |
| | )(rU)(rC)(rC)(rC)(rU)(mU)(mU)(mC)(mU)(mC)(mA)(mU)(mU)#(mU)#(mC)#(mG |
| | ) (SEQ ID NO: 19); |
| CR48-194 | (mN)#(mN)#(mN)#(mN)(mN)(mN)(dN)#(mN)(mN)(mN)(mN)(fN)(mN)(fN)(mN)( |
| | fN)(mN)(mN)(rN)#(fN)(mN)(mN)(mN)(mN)(mG)(rU)(rU)(rG)(mU)(mA)(mG)(m |
| | C)(rU)(rC)(rC)(rC)(rU)(mU)(mU)(mC)(mU)(mC)(mA)(mU)(mU)#(mU)#(mC)#(m |
| | G) (SEQ ID NO: 20); |
| CR48-195 | (mN)#(mN)#(mN)#(mN)(mN)(mN)(dN)#(mN)(mN)(mN)(mN)(fN)(mN)(fN)(mN)( |
| | fN)(mN)(mN)(rN)#(mN)(fN)(mN)(mN)(mN)(mG)(rU)(rU)(rG)(mU)(mA)(mG)(m |
| | C)(rU)(rC)(rC)(rC)(rU)(mU)(mU)(mC)(mU)(mC)(mA)(mU)(mU)#(mU)#(mC)#(m |
| | G) (SEQ ID NO: 21); |
| CR48-196 | (mN)#(mN)#(mN)#(mN)(mN)(mN)(dN)#(mN)(mN)(mN)(mN)(mN)(mN)(fN)(mN) |
| | (fN)(mN)(mN)(rN)#(fN)(mN)(mN)(mN)(mN)(mG)(rU)(rU)(rG)(mU)(mA)(mG)(m |
| | C)(rU)(rC)(rC)(rC)(rU)(mU)(mU)(mC)(mU)(mC)(mA)(mU)(mU)#(mU)#(mC)#(m |
| | G) (SEQ ID NO: 22); |
| CR48-197 | (mN)#(mN)#(mN)#(mN)(mN)(mN)(dN)#(mN)(mN)(mN)(mN)(mN)(mN)(fN)(mN) |
| | (fN)(mN)(mN)(rN)#(mN)(fN)(mN)(mN)(mN)(mG)(rU)(rU)(rG)(mU)(mA)(mG)(m |
| | C)(rU)(rC)(rC)(rC)(rU)(mU)(mU)(mC)(mU)(mC)(mA)(mU)(mU)#(mU)#(mC)#(m |
| | G) (SEQ ID NO: 23); |
| CR48-198 | (mN)#(mN)#(mN)#(mN)(mN)(mN)(dN)#(mN)(mN)(mN)(mN)(fN)(mN)(fN)(mN)( |
| | fN)(mN)(mN)(mN)(fN)(mN)(mN)(mN)(mN)(mG)(rU)(rU)(rG)(mU)(mA)(mG)(m |
| | C)(rU)(rC)(rC)(rC)(rU)(mU)(mU)(mC)(mU)(mC)(mA)(mU)(mU)#(mU)#(mC)#(m |
| | G) (SEQ ID NO: 24); |
| CR48-199 | (mN)#(mN)#(mN)#(mN)(mN)(mN)(dN)#(mN)(mN)(mN)(mN)(fN)(mN)(fN)(mN)( |
| | fN)(mN)(mN)(mN)(mN)(fN)(mN)(mN)(mN)(mG)(rU)(rU)(rG)(mU)(mA)(mG)(m |
| | C)(rU)(rC)(rC)(rC)(rU)(mU)(mU)(mC)(mU)(mC)(mA)(mU)(mU)#(mU)#(mC)#(m |
| | G) (SEQ ID NO: 25); |
| CR48-200 | (mN)#(mN)#(mN)#(mN)(mN)(mN)(dN)#(mN)(mN)(mN)(mN)(mN)(mN)(fN)(mN) |
| | (fN)(mN)(mN)(mN)(fN)(mN)(mN)(mN)(mN)(mG)(rU)(rU)(rG)(mU)(mA)(mG)(m |
| | C)(rU)(rC)(rC)(rC)(rU)(mU)(mU)(mC)(mU)(mC)(mA)(mU)(mU)#(mU)#(mC)#(m |
| | G) (SEQ ID NO: 26); |
| CR48-201 | (mN)#(mN)#(mN)#(mN)(mN)(mN)(dN)#(mN)(mN)(mN)(mN)(mN)(mN)(fN)(mN) |
| | (fN)(mN)(mN)(mN)(mN)(fN)(mN)(mN)(mN)(mG)(rU)(rU)(rG)(mU)(mA)(mG)(m |
| | C)(rU)(rC)(rC)(rC)(rU)(mU)(mU)(mC)(mU)(mC)(mA)(mU)(mU)#(mU)#(mC)#(m |
| | G) (SEQ ID NO: 27); |
| CR48-202 | (mN)#(mN)#(mN)#(mN)(mN)(mN)(dN)#(mN)(mN)(mN)(mN)(fN)(mN)(fN)(mN)( |
| | fN)(mN)(mN)(fN)(fN)(mN)(mN)(mN)(mN)(mG)(rU)(rU)(rG)(mU)(mA)(mG)(mC) |
| | (rU)(rC)(rC)(rC)(rU)(mU)(mU)(mC)(mU)(mC)(mA)(mU)(mU)#(mU)#(mC)#(mG) |
| | (SEQ ID NO: 28); |
| CR48-203 | (mN)#(mN)#(mN)#(mN)(mN)(mN)(dN)#(mN)(mN)(mN)(mN)(fN)(mN)(fN)(mN)( |
| | fN)(mN)(mN)(fN)(mN)(fN)(mN)(mN)(mN)(mG)(rU)(rU)(rG)(mU)(mA)(mG)(mC) |
| | (rU)(rC)(rC)(rC)(rU)(mU)(mU)(mC)(mU)(mC)(mA)(mU)(mU)#(mU)#(mC)#(mG) |
| | (SEQ ID NO: 29); |
| CR48-204 | (mN)#(mN)#(mN)#(mN)(mN)(mN)(dN)#(mN)(mN)(mN)(mN)(mN)(mN)(fN)(mN) |
| | (fN)(mN)(mN)(fN)(fN)(mN)(mN)(mN)(mN)(mG)(rU)(rU)(rG)(mU)(mA)(mG)(mC |
| | )(rU)(rC)(rC)(rC)(rU)(mU)(mU)(mC)(mU)(mC)(mA)(mU)(mU)#(mU)#(mC)#(mG |
| | ) (SEQ ID NO: 30); |
| CR48-205 | (mN)#(mN)#(mN)#(mN)(mN)(mN)(dN)#(mN)(mN)(mN)(mN)(mN)(mN)(fN)(mN) |
| | (fN)(mN)(mN)(fN)(mN)(fN)(mN)(mN)(mN)(mG)(rU)(rU)(rG)(mU)(mA)(mG)(mC |
| | )(rU)(rC)(rC)(rC)(rU)(mU)(mU)(mC)(mU)(mC)(mA)(mU)(mU)#(mU)#(mC)#(mG |
| | ) (SEQ ID NO: 31); |
| CR48-213 | (mN)#(mN)#(mN)#(mN)(mN)(mN)(dN)#(mN)(mN)(mN)(mN)(mN)(mN)(fN)(mN) |
| | (fN)(mN)(mN)(rN)(rN)(rN)(mN)(rN)(rN)(mG)(dT)#(rU)(mG)(mU)(mA)(mG)(mC) |
| | (rU)(rC)(rC)(rC)(rU)(mU)(mU)(mC)(mU)(mC)(mA)(mU)(mU)#(mU)#(mC)#(mG) |
| | (SEQ ID NO: 32); |
| CR48-214 | (mN)#(mN)#(mN)#(mN)(mN)(mN)(dN)#(mN)(mN)(mN)(mN)(mN)(mN)(fN)(mN) |
| | (fN)(mN)(mN)(rN)(rN)(rN)(mN)(rN)(rN)(mG)(dT)#(rU)(mG)(mU)(mA)(mG)(mC) |
| | (rU)(rC)(mC)(rC)(rU)(mU)(mU)(mC)(mU)(mC)(mA)(mU)(mU)#(mU)#(mC)#(mG |
| | ) (SEQ ID NO: 33); |
| CR48-215 | (mN)#(mN)#(mN)#(mN)(mN)(mN)(dN)#(mN)(mN)(mN)(mN)(mN)(mN)(fN)(mN) |
| | (fN)(mN)(mN)(rN)(rN)(rN)(mN)(rN)(rN)(mG)(dT)#(rU)(mG)(mU)(mA)(mG)(mC) |
| | (rU)(rC)(rC)(mC)(rU)(mU)(mU)(mC)(mU)(mC)(mA)(mU)(mU)#(mU)#(mC)#(mG |
| | ) (SEQ ID NO: 34); |
| CR48-216 | (mN)#(mN)#(mN)#(mN)(mN)(mN)(dN)#(mN)(mN)(mN)(mN)(mN)(mN)(fN)(mN) |
| | (fN)(mN)(mN)(rN)(rN)(rN)(mN)(rN)(rN)(mG)(dT)#(rU)(mG)(mU)(mA)(mG)(mC) |
| | (rU)(rC)(mC)(mC)(rU)(mU)(mU)(mC)(mU)(mC)(mA)(mU)(mU)#(mU)#(mC)#(m |
| | G) (SEQ ID NO: 35); |
| CR48-217 | (mN)#(mN)#(mN)#(mN)(mN)(mN)(dN)#(mN)(mN)(mN)(mN)(mN)(mN)(fN)(mN) |
| | (fN)(mN)(mN)(rN)(rN)(rN)(mN)(rN)(rN)(mG)(rU)(rU)(rG)(mU)(mA)(mG)(mC)(d |
| | T)#(rC)(rC)(rC)(rU)(mU)(mU)(mC)(mU)(mC)(mA)(mU)(mU)#(mU)#(mC)#(mG) |
| | (SEQ ID NO: 36); |
| CR48-218 | (mN)#(mN)#(mN)#(mN)(mN)(mN)(dN)#(mN)(mN)(mN)(mN)(mN)(mN)(fN)(mN) |
| | (fN)(mN)(mN)(rN)(rN)(rN)(mN)(rN)(rN)(mG)(rU)(rU)(rG)(mU)(mA)(mG)(mC)(r |
| | U)(dC)#(rC)(rC)(rU)(mU)(mU)(mC)(mU)(mC)(mA)(mU)(mU)#(mU)#(mC)#(mG) |
| | (SEQ ID NO: 37); |
| CR48-219 | (mN)#(mN)#(mN)#(mN)(mN)(mN)(dN)#(mN)(mN)(mN)(mN)(mN)(mN)(fN)(mN) |
| | (fN)(mN)(mN)(rN)(rN)(rN)(mN)(rN)(rN)(mG)(rU)(rU)(rG)(mU)(mA)(mG)(mC)(r |
| | U)(rC)(dC)#(rC)(rU)(mU)(mU)(mC)(mU)(mC)(mA)(mU)(mU)#(mU)#(mC)#(mG) |
| | (SEQ ID NO: 38); |
| CR48-220 | (mN)#(mN)#(mN)#(mN)(mN)(mN)(dN)#(mN)(mN)(mN)(mN)(mN)(mN)(fN)(mN) |
| | (fN)(mN)(mN)(rN)(rN)(rN)(mN)(rN)(rN)(mG)(rU)(rU)(rG)(mU)(mA)(mG)(mC)(r |
| | U)(rC)(rC)(dC)#(rU)(mU)(mU)(mC)(mU)(mC)(mA)(mU)(mU)#(mU)#(mC)#(mG) |
| | (SEQ ID NO: 39); |
| CR48-221 | (mN)#(mN)#(mN)#(mN)(mN)(mN)(dN)#(mN)(mN)(mN)(mN)(mN)(mN)(fN)(mN) |
| | (fN)(mN)(mN)(rN)(rN)(rN)(mN)(rN)(rN)(mG)(rU)(rU)(rG)(mU)(mA)(mG)(mC)(r |
| | U)(rC)(rC)(rC)(dT)#(mU)(mU)(mC)(mU)(mC)(mA)(mU)(mU)#(mU)#(mC)#(mG) |
| | (SEQ ID NO: 40); |
| CR48-222 | (mN)#(mN)#(mN)#(mN)(mN)(mN)(dN)#(mN)(mN)(mN)(mN)(mN)(mN)(fN)(mN) |
| | (fN)(mN)(mN)(rN)(rN)(rN)(mN)(rN)(rN)(mG)(rU)(rU)(rG)(mU)(mA)(mG)(mC)(d |
| | T)#(rC)(dC)#(rC)(dT)#(mU)(mU)(mC)(mU)(mC)(mA)(mU)(mU)#(mU)#(mC)#(m |
| | G) (SEQ ID NO: 41); |
| CR48-223 | (mN)#(mN)#(mN)#(mN)(mN)(mN)(dN)#(mN)(mN)(mN)(mN)(mN)(mN)(fN)(mN) |
| | (fN)(mN)(mN)(rN)(rN)(rN)(mN)(rN)(rN)(mG)(dT)#(rU)(rG)(mU)(mA)(mG)(mC)( |
| | dT)#(dC)#(dC)#(rC)(dT)#(mU)(mU)(mC)(mU)(mC)(mA)(mU)(mU)#(mU)#(mC)# |
| | (mG) (SEQ ID NO: 42); |
| CR48-224 | (mN)#(mN)#(mN)#(mN)(mN)(mN)(dN)#(mN)(mN)(mN)(mN)(mN)(mN)(fN)(mN) |
| | (fN)(mN)(mN)(rN)(rN)(rN)(mN)(rN)(rN)(mG)(dT)#(rU)(mG)(mU)(mA)(mG)(mC) |
| | (dT)#(rC)(mC)(rC)(dT)#(mU)(mU)(mC)(mU)(mC)(mA)(mU)(mU)#(mU)#(mC)#( |
| | mG) (SEQ ID NO: 43); |
| CR48-225 | (mN)#(mN)#(mN)#(mN)(mN)(mN)(dN)#(mN)(mN)(mN)(mN)(mN)(mN)(fN)(mN) |
| | (fN)(mN)(mN)(rN)(rN)(rN)(mN)(rN)(rN)(mG)(dT)#(rU)(mG)(mU)(mA)(mG)(mC) |
| | (dT)#(rC)(dC)#(mC)(dT)#(mU)(mU)(mC)(mU)(mC)(mA)(mU)(mU)#(mU)#(mC)# |
| | (mG) (SEQ ID NO: 44); |
| CR48-226 | (mN)#(mN)#(mN)#(mN)(mN)(mN)(dN)#(mN)(mN)(mN)(mN)(mN)(mN)(fN)(mN) |
| | (fN)(mN)(mN)(rN)(rN)(rN)(mN)(rN)(rN)(mG)(dT)#(rU)(mG)(mU)(mA)(mG)(mC) |
| | (dT)#(rC)(mC)(mC)(dT)#(mU)(mU)(mC)(mU)(mC)(mA)(mU)(mU)#(mU)#(mC)#( |
| | mG) (SEQ ID NO: 45); |
| CR48-227 | (mN)#(mN)#(mN)#(mN)(mN)(mN)(dN)#(mN)(mN)(mN)(mN)(mN)(mN)(fN)(mN) |
| | (fN)(mN)(mN)(rN)(rN)(rN)(mN)(rN)(rN)(mG)(dT)#(rU)(mG)(mU)(mA)(mG)(mC) |
| | (dT)#(dC)#(mC)(mC)(dT)#(mU)(mU)(mC)(mU)(mC)(mA)(mU)(mU)#(mU)#(mC) |
| | #(mG) (SEQ ID NO: 46); |
| CR48-199- | (mN)#(mN)#(mN)#(mN)(mN)(mN)(dN)#(mN)(mN)(mN)(mN)(fN)(mN)(fN)(mN)( |
| V1.1 | fN)(mN)(mN)(mN)(mN)(fN)(mN)(mN)(mN)(mG)(rU)(rU)(mG)(mU)(mA)(mG)(m |
| | C)(rU)(rC)(rC)(dC)#(rU)(mU)(mU)(mC)(mU)(mC)(mA)(mU)(mU)#(mU)#(mC)#( |
| | mG) (SEQ ID NO: 47); |
| CR48-199- | (mN)#(mN)#(mN)#(mN)(mN)(mN)(dN)#(mN)(mN)(mN)(mN)(fN)(mN)(fN)(mN)( |
| V1.2 | fN)(mN)(mN)(mN)(mN)(fN)(mN)(mN)(mN)(mG)(rU)(rU)(mG)(mU)(mA)(mG)(m |
| | C)(rU)(rC)(dC)#(rC)(rU)(mU)(mU)(mC)(mU)(mC)(mA)(mU)(mU)#(mU)#(mC)#( |
| | mG) (SEQ ID NO: 48); |
| CR48-199- | (mN)#(mN)#(mN)#(mN)(mN)(mN)(dN)#(mN)(mN)(mN)(mN)(fN)(mN)(fN)(mN)( |
| V1.3 | fN)(mN)(mN)(mN)(mN)(fN)(mN)(mN)(mN)(mG)(rU)(rU)(mG)(mU)(mA)(mG)(m |
| | C)(rU)(rC)(rC)(rC)(dT)#(mU)(mU)(mC)(mU)(mC)(mA)(mU)(mU)#(mU)#(mC)#( |
| | mG) (SEQ ID NO: 49); |
| CR48-199- | (mN)#(mN)#(mN)#(mN)(mN)(mN)(dN)#(mN)(mN)(mN)(mN)(fN)(mN)(fN)(mN)( |
| V1.4 | fN)(mN)(mN)(mN)(mN)(fN)(mN)(mN)(mN)(mG)(rU)(rU)(mG)(mU)(mA)(mG)(m |
| | C)(rU)(rC)(mC)(rC)(rU)(mU)(mU)(mC)(mU)(mC)(mA)(mU)(mU)#(mU)#(mC)#( |
| | mG) (SEQ ID NO: 50); |
| CR48-199- | (mN)#(mN)#(mN)#(mN)(mN)(mN)(dN)#(mN)(mN)(mN)(mN)(fN)(mN)(fN)(mN)( |
| V1.5 | fN)(mN)(mN)(mN)(mN)(fN)(mN)(mN)(mN)(mG)(rU)(rU)(mG)(mU)(mA)(mG)(m |
| | C)(rU)(rC)(dC)#(dC)#(rU)(mU)(mU)(mC)(mU)(mC)(mA)(mU)(mU)#(mU)#(mC)# |
| | (mG) (SEQ ID NO: 51); |
| CR48-199- | (mN)#(mN)#(mN)#(mN)(mN)(mN)(dN)#(mN)(mN)(mN)(mN)(fN)(mN)(fN)(mN)( |
| V1.6 | fN)(mN)(mN)(mN)(mN)(fN)(mN)(mN)(mN)(mG)(rU)(rU)(mG)(mU)(mA)(mG)(m |
| | C)(rU)(rC)(dC)#(rC)(dT)#(mU)(mU)(mC)(mU)(mC)(mA)(mU)(mU)#(mU)#(mC)# |
| | (mG) (SEQ ID NO: 52); |
| CR48-199- | (mN)#(mN)#(mN)#(mN)(mN)(mN)(dN)#(mN)(mN)(mN)(mN)(fN)(mN)(fN)(mN)( |
| V1.7 | fN)(mN)(mN)(mN)(mN)(fN)(mN)(mN)(mN)(mG)(rU)(rU)(mG)(mU)(mA)(mG)(m |
| | C)(rU)(rC)(dC)#(dC)#(dT)#(mU)(mU)(mC)(mU)(mC)(mA)(mU)(mU)#(mU)#(mC |
| | )#(mG) (SEQ ID NO: 53); |
| | (mN)#(mN)#(mN)#(mN)(mN)(mN)(dN)#(mN)(mN)(mN)(mN)(fN)(mN)(fN)(mN)( |
| CR48-199- | fN)(mN)(mN)(mN)(mN)(fN)(mN)(mN)(mN)(mG)(rU)(rU)(mG)(mU)(mA)(mG)(m |
| V1.8 | C)(rU)(rC)(mC)(dC)#(rU)(mU)(mU)(mC)(mU)(mC)(mA)(mU)(mU)#(mU)#(mC)# |
| | (mG) (SEQ ID NO: 54); |
| CR48-199- | (mN)#(mN)#(mN)#(mN)(mN)(mN)(dN)#(mN)(mN)(mN)(mN)(fN)(mN)(fN)(mN)( |
| V1.9 | fN)(mN)(mN)(mN)(mN)(fN)(mN)(mN)(mN)(mG)(rU)(rU)(mG)(mU)(mA)(mG)(m |
| | C)(rU)(rC)(mC)(rC)(dT)#(mU)(mU)(mC)(mU)(mC)(mA)(mU)(mU)#(mU)#(mC)#( |
| | mG) (SEQ ID NO: 55); |
| CR48-199- | (mN)#(mN)#(mN)#(mN)(mN)(mN)(dN)#(mN)(mN)(mN)(mN)(fN)(mN)(fN)(mN)( |
| V1.10 | fN)(mN)(mN)(mN)(mN)(fN)(mN)(mN)(mN)(mG)(rU)(rU)(mG)(mU)(mA)(mG)(m |
| | C)(rU)(rC)(mC)(dC)#(dT)#(mU)(mU)(mC)(mU)(mC)(mA)(mU)(mU)#(mU)#(mC) |
| | #(mG) (SEQ ID NO: 56); |
| CR48-199- | (mN)#(mN)#(mN)#(mN)(mN)(mN)(dN)#(mN)(mN)(mN)(mN)(fN)(mN)(fN)(mN)( |
| V1.11 | fN)(mN)(mN)(mN)(mN)(fN)(mN)(mN)(mN)(mG)(rU)(rU)(mG)(mU)(mA)(mG)(m |
| | C)(rU)(rC)(mC)(mC)(rU)(mU)(mU)(mC)(mU)(mC)(mA)(mU)(mU)#(mU)#(mC)#( |
| | mG) (SEQ ID NO: 57); |
| CR48-199- | (mN)#(mN)#(mN)#(mN)(mN)(mN)(dN)#(mN)(mN)(mN)(mN)(fN)(mN)(fN)(mN)( |
| V1.12 | fN)(mN)(mN)(mN)(mN)(fN)(mN)(mN)(mN)(mG)(rU)(rU)(mG)(mU)(mA)(mG)(m |
| | C)(rU)(rC)(mC)(mC)(dT)#(mU)(mU)(mC)(mU)(mC)(mA)(mU)(mU)#(mU)#(mC) |
| | #(mG) (SEQ ID NO: 58); |
| CR48-199- | (mN)#(mN)#(mN)#(mN)(mN)(mN)(dN)#(mN)(mN)(mN)(mN)(fN)(mN)(fN)(mN)( |
| V1.13 | fN)(mN)(mN)(mN)(mN)(fN)(mN)(mN)(mN)(mG)(rU)(rU)(mG)(mU)(mA)(mG)(m |
| | C)(dT)#(rC)(rC)(dC)#(rU)(mU)(mU)(mC)(mU)(mC)(mA)(mU)(mU)#(mU)#(mC)# |
| | (mG) (SEQ ID NO: 59); |
| CR48-199- | (mN)#(mN)#(mN)#(mN)(mN)(mN)(dN)#(mN)(mN)(mN)(mN)(fN)(mN)(fN)(mN)( |
| V1.14 | fN)(mN)(mN)(mN)(mN)(fN)(mN)(mN)(mN)(mG)(rU)(rU)(mG)(mU)(mA)(mG)(m |
| | C)(dT)#(rC)(dC)#(rC)(rU)(mU)(mU)(mC)(mU)(mC)(mA)(mU)(mU)#(mU)#(mC)# |
| | (mG) (SEQ ID NO: 60); |
| CR48-199- | (mN)#(mN)#(mN)#(mN)(mN)(mN)(dN)#(mN)(mN)(mN)(mN)(fN)(mN)(fN)(mN)( |
| V1.15 | fN)(mN)(mN)(mN)(mN)(fN)(mN)(mN)(mN)(mG)(rU)(rU)(mG)(mU)(mA)(mG)(m |
| | C)(dT)#(rC)(rC)(rC)(dT)#(mU)(mU)(mC)(mU)(mC)(mA)(mU)(mU)#(mU)#(mC)# |
| | (mG) (SEQ ID NO: 61); |
| CR48-199- | (mN)#(mN)#(mN)#(mN)(mN)(mN)(dN)#(mN)(mN)(mN)(mN)(fN)(mN)(fN)(mN)( |
| V1.16 | fN)(mN)(mN)(mN)(mN)(fN)(mN)(mN)(mN)(mG)(rU)(rU)(mG)(mU)(mA)(mG)(m |
| | C)(dT)#(rC)(mC)(rC)(rU)(mU)(mU)(mC)(mU)(mC)(mA)(mU)(mU)#(mU)#(mC)#( |
| | mG) (SEQ ID NO: 62); |
| CR48-199- | (mN)#(mN)#(mN)#(mN)(mN)(mN)(dN)#(mN)(mN)(mN)(mN)(fN)(mN)(fN)(mN)( |
| V1.17 | fN)(mN)(mN)(mN)(mN)(fN)(mN)(mN)(mN)(mG)(rU)(rU)(mG)(mU)(mA)(mG)(m |
| | C)(dT)#(rC)(dC)#(dC)#(rU)(mU)(mU)(mC)(mU)(mC)(mA)(mU)(mU)#(mU)#(mC |
| | )#(mG) (SEQ ID NO: 63); |
| CR48-199- | (mN)#(mN)#(mN)#(mN)(mN)(mN)(dN)#(mN)(mN)(mN)(mN)(fN)(mN)(fN)(mN)( |
| V1.18 | fN)(mN)(mN)(mN)(mN)(fN)(mN)(mN)(mN)(mG)(rU)(rU)(mG)(mU)(mA)(mG)(m |
| | C)(dT)#(rC)(dC)#(rC)(dT)#(mU)(mU)(mC)(mU)(mC)(mA)(mU)(mU)#(mU)#(mC) |
| | #(mG) (SEQ ID NO: 64); |
| CR48-199- | (mN)#(mN)#(mN)#(mN)(mN)(mN)(dN)#(mN)(mN)(mN)(mN)(fN)(mN)(fN)(mN)( |
| V1.19 | fN)(mN)(mN)(mN)(mN)(fN)(mN)(mN)(mN)(mG)(rU)(rU)(mG)(mU)(mA)(mG)(m |
| | C)(dT)#(rC)(dC)#(dC)#(dT)#(mU)(mU)(mC)(mU)(mC)(mA)(mU)(mU)#(mU)#(m |
| | C)#(mG) (SEQ ID NO: 65); |
| CR48-199- | (mN)#(mN)#(mN)#(mN)(mN)(mN)(dN)#(mN)(mN)(mN)(mN)(fN)(mN)(fN)(mN)( |
| V1.20 | fN)(mN)(mN)(mN)(mN)(fN)(mN)(mN)(mN)(mG)(rU)(rU)(mG)(mU)(mA)(mG)(m |
| | C)(dT)#(rC)(mC)(dC)#(rU)(mU)(mU)(mC)(mU)(mC)(mA)(mU)(mU)#(mU)#(mC) |
| | #(mG) (SEQ ID NO: 66); |
| CR48-199- | (mN)#(mN)#(mN)#(mN)(mN)(mN)(dN)#(mN)(mN)(mN)(mN)(fN)(mN)(fN)(mN)( |
| V1.21 | fN)(mN)(mN)(mN)(mN)(fN)(mN)(mN)(mN)(mG)(rU)(rU)(mG)(mU)(mA)(mG)(m |
| | C)(dT)#(rC)(mC)(rC)(dT)#(mU)(mU)(mC)(mU)(mC)(mA)(mU)(mU)#(mU)#(mC) |
| | #(mG) (SEQ ID NO: 67); |
| CR48-199- | (mN)#(mN)#(mN)#(mN)(mN)(mN)(dN)#(mN)(mN)(mN)(mN)(fN)(mN)(fN)(mN)( |
| V1.22 | fN)(mN)(mN)(mN)(mN)(fN)(mN)(mN)(mN)(mG)(rU)(rU)(mG)(mU)(mA)(mG)(m |
| | C)(dT)#(rC)(mC)(dC)#(dT)#(mU)(mU)(mC)(mU)(mC)(mA)(mU)(mU)#(mU)#(m |
| | C)#(mG) (SEQ ID NO: 68); |
| CR48-199- | (mN)#(mN)#(mN)#(mN)(mN)(mN)(dN)#(mN)(mN)(mN)(mN)(fN)(mN)(fN)(mN)( |
| V1.23 | fN)(mN)(mN)(mN)(mN)(fN)(mN)(mN)(mN)(mG)(rU)(rU)(mG)(mU)(mA)(mG)(m |
| | C)(dT)#(rC)(mC)(mC)(rU)(mU)(mU)(mC)(mU)(mC)(mA)(mU)(mU)#(mU)#(mC) |
| | #(mG) (SEQ ID NO: 69); |
| CR48-199- | (mN)#(mN)#(mN)#(mN)(mN)(mN)(dN)#(mN)(mN)(mN)(mN)(fN)(mN)(fN)(mN)( |
| V1.24 | fN)(mN)(mN)(mN)(mN)(fN)(mN)(mN)(mN)(mG)(rU)(rU)(mG)(mU)(mA)(mG)(m |
| | C)(dT)#(rC)(mC)(mC)(dT)#(mU)(mU)(mC)(mU)(mC)(mA)(mU)(mU)#(mU)#(mC |
| | )#(mG) (SEQ ID NO: 70); |
| CR48-199- | (mN)#(mN)#(mN)#(mN)(mN)(mN)(dN)#(mN)(mN)(mN)(mN)(fN)(mN)(fN)(mN)( |
| V1.25 | fN)(mN)(mN)(mN)(mN)(fN)(mN)(mN)(mN)(mG)(dT)#(rU)(mG)(mU)(mA)(mG)( |
| | mC)(dT)#(rC)(rC)(dC)#(rU)(mU)(mU)(mC)(mU)(mC)(mA)(mU)(mU)#(mU)#(mC |
| | )#(mG) (SEQ ID NO: 71); |
| CR48-199- | (mN)#(mN)#(mN)#(mN)(mN)(mN)(dN)#(mN)(mN)(mN)(mN)(fN)(mN)(fN)(mN)( |
| V1.26 | fN)(mN)(mN)(mN)(mN)(fN)(mN)(mN)(mN)(mG)(dT)#(rU)(mG)(mU)(mA)(mG)( |
| | mC)(dT)#(rC)(dC)#(rC)(rU)(mU)(mU)(mC)(mU)(mC)(mA)(mU)(mU)#(mU)#(mC |
| | )#(mG) (SEQ ID NO: 72); |
| CR48-199- | (mN)#(mN)#(mN)#(mN)(mN)(mN)(dN)#(mN)(mN)(mN)(mN)(fN)(mN)(fN)(mN)( |
| V1.27 | fN)(mN)(mN)(mN)(mN)(fN)(mN)(mN)(mN)(mG)(dT)#(rU)(mG)(mU)(mA)(mG)( |
| | mC)(dT)#(rC)(rC)(rC)(dT)#(mU)(mU)(mC)(mU)(mC)(mA)(mU)(mU)#(mU)#(mC |
| | )#(mG) (SEQ ID NO: 73); |
| CR48-199- | (mN)#(mN)#(mN)#(mN)(mN)(mN)(dN)#(mN)(mN)(mN)(mN)(fN)(mN)(fN)(mN)( |
| V1.28 | fN)(mN)(mN)(mN)(mN)(fN)(mN)(mN)(mN)(mG)(dT)#(rU)(mG)(mU)(mA)(mG)( |
| | mC)(dT)#(rC)(mC)(rC)(rU)(mU)(mU)(mC)(mU)(mC)(mA)(mU)(mU)#(mU)#(mC) |
| | #(mG) (SEQ ID NO: 74); |
| CR48-199- | (mN)#(mN)#(mN)#(mN)(mN)(mN)(dN)#(mN)(mN)(mN)(mN)(fN)(mN)(fN)(mN)( |
| V1.29 | fN)(mN)(mN)(mN)(mN)(fN)(mN)(mN)(mN)(mG)(dT)#(rU)(mG)(mU)(mA)(mG)( |
| | mC)(dT)#(rC)(dC)#(dC)#(rU)(mU)(mU)(mC)(mU)(mC)(mA)(mU)(mU)#(mU)#(m |
| | C)#(mG) (SEQ ID NO: 75); |
| CR48-199- | (mN)#(mN)#(mN)#(mN)(mN)(mN)(dN)#(mN)(mN)(mN)(mN)(fN)(mN)(fN)(mN)( |
| V1.30 | fN)(mN)(mN)(mN)(mN)(fN)(mN)(mN)(mN)(mG)(dT)#(rU)(mG)(mU)(mA)(mG)( |
| | mC)(dT)#(rC)(dC)#(rC)(dT)#(mU)(mU)(mC)(mU)(mC)(mA)(mU)(mU)#(mU)#(m |
| | C)#(mG) (SEQ ID NO: 76); |
| CR48-199- | (mN)#(mN)#(mN)#(mN)(mN)(mN)(dN)#(mN)(mN)(mN)(mN)(fN)(mN)(fN)(mN)( |
| V1.31 | fN)(mN)(mN)(mN)(mN)(fN)(mN)(mN)(mN)(mG)(dT)#(rU)(mG)(mU)(mA)(mG)( |
| | mC)(dT)#(rC)(dC)#(dC)#(dT)#(mU)(mU)(mC)(mU)(mC)(mA)(mU)(mU)#(mU)#( |
| | mC)#(mG) (SEQ ID NO: 77); |
| CR48-199- | (mN)#(mN)#(mN)#(mN)(mN)(mN)(dN)#(mN)(mN)(mN)(mN)(fN)(mN)(fN)(mN)( |
| V1.32 | fN)(mN)(mN)(mN)(mN)(fN)(mN)(mN)(mN)(mG)(dT)#(rU)(mG)(mU)(mA)(mG)( |
| | mC)(dT)#(rC)(mC)(dC)#(rU)(mU)(mU)(mC)(mU)(mC)(mA)(mU)(mU)#(mU)#(m |
| | C)#(mG) (SEQ ID NO: 78); |
| CR48-199- | (mN)#(mN)#(mN)#(mN)(mN)(mN)(dN)#(mN)(mN)(mN)(mN)(fN)(mN)(fN)(mN)( |
| V1.33 | fN)(mN)(mN)(mN)(mN)(fN)(mN)(mN)(mN)(mG)(dT)#(rU)(mG)(mU)(mA)(mG)( |
| | mC)(dT)#(rC)(mC)(rC)(dT)#(mU)(mU)(mC)(mU)(mC)(mA)(mU)(mU)#(mU)#(m |
| | C)#(mG) (SEQ ID NO: 79); |
| CR48-199- | (mN)#(mN)#(mN)#(mN)(mN)(mN)(dN)#(mN)(mN)(mN)(mN)(fN)(mN)(fN)(mN)( |
| V1.34 | fN)(mN)(mN)(mN)(mN)(fN)(mN)(mN)(mN)(mG)(dT)#(rU)(mG)(mU)(mA)(mG)( |
| | mC)(dT)#(rC)(mC)(dC)#(dT)#(mU)(mU)(mC)(mU)(mC)(mA)(mU)(mU)#(mU)#( |
| | mC)#(mG) (SEQ ID NO: 80); |
| CR48-199- | (mN)#(mN)#(mN)#(mN)(mN)(mN)(dN)#(mN)(mN)(mN)(mN)(fN)(mN)(fN)(mN)( |
| V1.35 | fN)(mN)(mN)(mN)(mN)(fN)(mN)(mN)(mN)(mG)(dT)#(rU)(mG)(mU)(mA)(mG)( |
| | mC)(dT)#(rC)(mC)(mC)(rU)(mU)(mU)(mC)(mU)(mC)(mA)(mU)(mU)#(mU)#(m |
| | C)#(mG) (SEQ ID NO: 81); |
| CR48-199- | (mN)#(mN)#(mN)#(mN)(mN)(mN)(dN)#(mN)(mN)(mN)(mN)(fN)(mN)(fN)(mN)( |
| V1.36 | fN)(mN)(mN)(mN)(mN)(fN)(mN)(mN)(mN)(mG)(dT)#(rU)(mG)(mU)(mA)(mG)( |
| | mC)(dT)#(rC)(mC)(mC)(dT)#(mU)(mU)(mC)(mU)(mC)(mA)(mU)(mU)#(mU)#(m |
| | C)#(mG) (SEQ ID NO: 82); |
| CR48-203- | (mN)#(mN)#(mN)#(mN)(mN)(mN)(dN)#(mN)(mN)(mN)(mN)(fN)(mN)(fN)(mN)( |
| V1.7 | fN)(mN)(mN)(fN)(mN)(fN)(mN)(mN)(mN)(mG)(rU)(rU)(mG)(mU)(mA)(mG)(m |
| | C)(rU)(rC)(dC)#(dC)#(dT)#(mU)(mU)(mC)(mU)(mC)(mA)(mU)(mU)#(mU)#(mC |
| | )#(mG) (SEQ ID NO: 83); |
| CR48-203- | (mN)#(mN)#(mN)#(mN)(mN)(mN)(dN)#(mN)(mN)(mN)(mN)(fN)(mN)(fN)(mN)( |
| V1.10 | fN)(mN)(mN)(fN)(mN)(fN)(mN)(mN)(mN)(mG)(rU)(rU)(mG)(mU)(mA)(mG)(m |
| | C)(rU)(rC)(mC)(dC)#(dT)#(mU)(mU)(mC)(mU)(mC)(mA)(mU)(mU)#(mU)#(mC) |
| | #(mG) (SEQ ID NO: 84); |
| CR48-203- | (mN)#(mN)#(mN)#(mN)(mN)(mN)(dN)#(mN)(mN)(mN)(mN)(fN)(mN)(fN)(mN)( |
| V1.12 | fN)(mN)(mN)(fN)(mN)(fN)(mN)(mN)(mN)(mG)(rU)(rU)(mG)(mU)(mA)(mG)(m |
| | C)(rU)(rC)(mC)(mC)(dT)#(mU)(mU)(mC)(mU)(mC)(mA)(mU)(mU)#(mU)#(mC) |
| | #(mG) (SEQ ID NO: 85); |
| CR48-203- | (mN)#(mN)#(mN)#(mN)(mN)(mN)(dN)#(mN)(mN)(mN)(mN)(fN)(mN)(fN)(mN)( |
| V1.18 | fN)(mN)(mN)(fN)(mN)(fN)(mN)(mN)(mN)(mG)(rU)(rU)(mG)(mU)(mA)(mG)(m |
| | C)(dT)#(rC)(dC)#(rC)(dT)#(mU)(mU)(mC)(mU)(mC)(mA)(mU)(mU)#(mU)#(mC) |
| | #(mG) (SEQ ID NO: 86); |
| CR48-203- | (mN)#(mN)#(mN)#(mN)(mN)(mN)(dN)#(mN)(mN)(mN)(mN)(fN)(mN)(fN)(mN)( |
| V1.19 | fN)(mN)(mN)(fN)(mN)(fN)(mN)(mN)(mN)(mG)(rU)(rU)(mG)(mU)(mA)(mG)(m |
| | C)(dT)#(rC)(dC)#(dC)#(dT)#(mU)(mU)(mC)(mU)(mC)(mA)(mU)(mU)#(mU)#(m |
| | C)#(mG) (SEQ ID NO: 87); |
| CR48-203- | (mN)#(mN)#(mN)#(mN)(mN)(mN)(dN)#(mN)(mN)(mN)(mN)(fN)(mN)(fN)(mN)( |
| V1.22 | fN)(mN)(mN)(fN)(mN)(fN)(mN)(mN)(mN)(mG)(rU)(rU)(mG)(mU)(mA)(mG)(m |
| | C)(dT)#(rC)(mC)(dC)#(dT)#(mU)(mU)(mC)(mU)(mC)(mA)(mU)(mU)#(mU)#(m |
| | C)#(mG) (SEQ ID NO: 88); |
| CR48-203- | (mN)#(mN)#(mN)#(mN)(mN)(mN)(dN)#(mN)(mN)(mN)(mN)(fN)(mN)(fN)(mN)( |
| V1.24 | fN)(mN)(mN)(fN)(mN)(fN)(mN)(mN)(mN)(mG)(rU)(rU)(mG)(mU)(mA)(mG)(m |
| | C)(dT)#(rC)(mC)(mC)(dT)#(mU)(mU)(mC)(mU)(mC)(mA)(mU)(mU)#(mU)#(mC |
| | )#(mG) (SEQ ID NO: 89); |
| CR48-203- | (mN)#(mN)#(mN)#(mN)(mN)(mN)(dN)#(mN)(mN)(mN)(mN)(fN)(mN)(fN)(mN)( |
| V1.30 | fN)(mN)(mN)(fN)(mN)(fN)(mN)(mN)(mN)(mG)(dT)#(rU)(mG)(mU)(mA)(mG)(m |
| | C)(dT)#(rC)(dC)#(rC)(dT)#(mU)(mU)(mC)(mU)(mC)(mA)(mU)(mU)#(mU)#(mC) |
| | #(mG) (SEQ ID NO: 90); |
| CR48-203- | (mN)#(mN)#(mN)#(mN)(mN)(mN)(dN)#(mN)(mN)(mN)(mN)(fN)(mN)(fN)(mN)( |
| V1.31 | fN)(mN)(mN)(fN)(mN)(fN)(mN)(mN)(mN)(mG)(dT)#(rU)(mG)(mU)(mA)(mG)(m |
| | C)(dT)#(rC)(dC)#(dC)#(dT)#(mU)(mU)(mC)(mU)(mC)(mA)(mU)(mU)#(mU)#(m |
| | C)#(mG) (SEQ ID NO: 91); |
| CR48-203- | (mN)#(mN)#(mN)#(mN)(mN)(mN)(dN)#(mN)(mN)(mN)(mN)(fN)(mN)(fN)(mN)( |
| V1.34 | fN)(mN)(mN)(fN)(mN)(fN)(mN)(mN)(mN)(mG)(dT)#(rU)(mG)(mU)(mA)(mG)(m |
| | C)(dT)#(rC)(mC)(dC)#(dT)#(mU)(mU)(mC)(mU)(mC)(mA)(mU)(mU)#(mU)#(m |
| | C)#(mG) (SEQ ID NO: 92); or |
| CR48-203- | (mN)#(mN)#(mN)#(mN)(mN)(mN)(dN)#(mN)(mN)(mN)(mN)(fN)(mN)(fN)(mN)( |
| V1.36 | fN)(mN)(mN)(fN)(mN)(fN)(mN)(mN)(mN)(mG)(dT)#(rU)(mG)(mU)(mA)(mG)(m |
| | C)(dT)#(rC)(mC)(mC)(dT)#(mU)(mU)(mC)(mU)(mC)(mA)(mU)(mU)#(mU)#(mC |
| | )#(mG) (SEQ ID NO: 93) |

wherein rN=RNA, mN=2′-O-methyl RNA, fN=2′-fluoro RNA, dN=2′-deoxy RNA, N #N=phosphorothioate linkage, and N=any nucleotide.

[0022] In certain embodiments, the chemically modified Nme gRNA comprises a tracrRNA portion nucleotide sequence of:

(SEQ ID NO: 10)
CGAAAUGAGAACCGUUGCUACAAUAAGGCCGUCUGAAAAGAUGUGCCG
CAACGCUCUGCCCCUUAAAGCUUCUGCUUUAAGGGGCAUCGUUUA
(TR93);
or
(SEQ ID NO: 11)
AGAACCGUUGCUACAAUAAGGCCGUCUGAAAAGAUGUGCCGCAACGCU
CUGCCCCUUAAAGCUCCUGCUUUAAGGGGCAUCGUUUA
(TR87).

[0023] In certain embodiments, the chemically modified Nme gRNA comprises a tracrRNA portion modification pattern selected from any one of:

(SEQ ID NO: 94)
(mC)#(mG)#(mA)#(rA)(rA)(rU)(rG)(rA)(rG
)(rA)(rA)(rC)(rC)(rG)(rU)(rU)(rG)(rC)(
rU)(rA)(rC)(rA)(rA)(rU)(rA)(rA)(rG)(rG
)(rC)(rC)(rG)(rU)(rC)(rU)(rG)(rA)(rA)(
rA)(rA)(rG)(rA)(rU)(rG)(rU)(rG)(rC)(rC
)(rG)(rC)(rA)(rA)(rC)(rG)(rC)(rU)(rC)(
rU)(rG)(rC)(rC)(rC)(rC)(rU)(rU)(rA)(rA
)(rA)(rG)(rC)(rU)(rC)(rC)(rU)(rG)(rC)(
rU)(rU)(rU)(rA)(rA)(rG)(rG)(rG)(rG)(rC
)(rA)(rU)(rC)(rG)(rU)#(mU)#(mU)#(mA)
(TR93-0);
(SEQ ID NO: 95)
(mC)#(mG)#(mA)#(rA)(rA)(rU)(rG)(rA)(rG
)(rA)(rA)(rC)(rC)(rG)(rU)(rU)(rG)(rC)(
rU)(rA)(rC)(rA)(rA)(rU)(rA)(rA)(rG)(rG
)(rC)(rC)(rG)(rU)(rC)(rU)(mG)(mA)(mA)(
mA)(rA)(rG)(rA)(rU)(rG)(rU)(rG)(rC)(rC
)(rG)(rC)(rA)(rA)(rC)(rG)(rC)(rU)(rC)(
rU)(rG)(rC)(rC)(rC)(rC)(rU)(rU)(rA)(rA
)(rA)(rG)(rC)(mU)(mC)(mC)(mU)(rG)(rC)(
rU)(rU)(rU)(rA)(rA)(rG)(rG)(rG)(rG)(rC
)(rA)(rU)(rC)(rG)(rU)#(mU)#(mU)#(mA)
(TR93-1);
(SEQ ID NO: 96)
(mC)#(mG)#(mA)#(mA)(mA)(mU)(mG)(mA)(mG
)(mA)(mA)(mC)(rC)(rG)(rU)(rU)(rG)(rC)(
rU)(rA)(rC)(rA)(rA)(rU)(rA)(rA)(rG)(rG
)(rC)(rC)(rG)(mU)(mC)(mU)(mG)(mA)(mA)(
mA)(mA)(mG)(rA)(rU)(rG)(rU)(rG)(rC)(rC
)(rG)(rC)(rA)(rA)(rC)(rG)(rC)(rU)(rC)(
rU)(rG)(rC)(rC)(mC)(mC)(mU)(mU)(mA)(mA
)(mA)(mG)(mC)(mU)(mC)(mC)(mU)(mG)(mC)(
mU)(mU)(mU)(mA)(mA)(mG)(mG)(rG)(rG)(rC
)(rA)(rU)(mC)(mG)(mU)#(mU)#(mU)#(mA)
(TR93-2), wherein rN = RNA, mN =
2′-O-methyl RNA, IN = 2′-fluoro RNA,
N#N = phosphorothioate linkage, and N =
any nucleotide.

[0024] In one aspect, the disclosure provides a chemically modified Neisseria meningitidis (Nme) guide RNA (gRNA) comprising: (a) a crRNA portion comprising (i) a guide sequence capable of hybridizing to a target polynucleotide sequence, and (ii) a repeat sequence; and (b) a tracrRNA portion comprising an anti-repeat nucleotide sequence that is complementary to the repeat sequence, wherein the crRNA portion comprises a modification pattern selected from the group consisting of:

| | |
|---|---|
| CR48-2 | (mN)#(mN)#(mN)#(mN)(mN)(rN)(rN)(rN)(rN)(rN)(rN)(rN)(rN)(rN)(rN)(rN)(rN)(r |
| | N)(rN)(rN)(rN)(rN)(rN)(rN)(rG)(rU)(rU)(rG)(rU)(rA)(rG)(rC)(rU)(rC)(rC)(rC) |
| | (rU)(mU)(mU)(mC)(mU)(mC)(mA)(mU)(mU)#(mU)#(mC)#(mG)(SEQ ID NO: 13); |
| CR48-154 | (mN)#(mN)#(mN)#(mN)(mN)(mN)(dN)#(mN)(mN)(mN)(mN)(fN)(mN)(fN)(mN)( |
| | fN)(mN)(mN)(rN)(rN)(rN)(mN)(rN)(rN)(mG)(rU)(rU)(rG)(mU)(mA)(mG)(mC)(r |
| | U)(rC)(rC)(rC)(rU)(mU)(mU)(mC)(mU)(mC)(mA)(mU)(mU)#(mU)#(mC)#(mG) |
| | (SEQ ID NO: 14); |
| CR48-155 | (mN)#(mN)#(mN)#(mN)(mN)(mN)(dN)#(mN)(mN)(mN)(mN)(mN)(mN)(fN)(mN) |
| | (fN)(mN)(mN)(rN)(rN)(rN)(mN)(rN)(rN)(mG)(rU)(rU)(rG)(mU)(mA)(mG)(mC)(r |
| | U)(rC)(rC)(rC)(rU)(mU)(mU)(mC)(mU)(mC)(mA)(mU)(mU)#(mU)#(mC)#(mG) |
| | (SEQ ID NO: 15); |
| CR48-190 | (mN)#(mN)#(mN)#(mN)(mN)(mN)(dN)#(mN)(mN)(mN)(mN)(fN)(mN)(fN)(mN)( |
| | fN)(mN)(mN)(rN)(fN)(mN)(mN)(mN)(mN)(mG)(rU)(rU)(rG)(mU)(mA)(mG)(mC) |
| | (rU)(rC)(rC)(rC)(rU)(mU)(mU)(mC)(mU)(mC)(mA)(mU)(mU)#(mU)#(mC)#(mG) |
| | (SEQ ID NO: 16); |
| CR48-191 | (mN)#(mN)#(mN)#(mN)(mN)(mN)(dN)#(mN)(mN)(mN)(mN)(fN)(mN)(fN)(mN)( |
| | fN)(mN)(mN)(rN)(mN)(fN)(mN)(mN)(mN)(mG)(rU)(rU)(rG)(mU)(mA)(mG)(mC) |
| | (rU)(rC)(rC)(rC)(rU)(mU)(mU)(mC)(mU)(mC)(mA)(mU)(mU)#(mU)#(mC)#(mG) |
| | (SEQ ID NO: 17); |
| CR48-192 | (mN)#(mN)#(mN)#(mN)(mN)(mN)(dN)#(mN)(mN)(mN)(mN)(mN)(mN)(fN)(mN) |
| | (fN)(mN)(mN)(rN)(fN)(mN)(mN)(mN)(mN)(mG)(rU)(rU)(rG)(mU)(mA)(mG)(mC |
| | )(rU)(rC)(rC)(rC)(rU)(mU)(mU)(mC)(mU)(mC)(mA)(mU)(mU)#(mU)#(mC)#(mG |
| | )(SEQ ID NO: 18); |
| CR48-193 | (mN)#(mN)#(mN)#(mN)(mN)(mN)(dN)#(mN)(mN)(mN)(mN)(mN)(mN)(fN)(mN) |
| | (fN)(mN)(mN)(rN)(mN)(fN)(mN)(mN)(mN)(mG)(rU)(rU)(rG)(mU)(mA)(mG)(mC |
| | )(rU)(rC)(rC)(rC)(rU)(mU)(mU)(mC)(mU)(mC)(mA)(mU)(mU)#(mU)#(mC)#(mG |
| | )(SEQ ID NO: 19); |
| CR48-194 | (mN)#(mN)#(mN)#(mN)(mN)(mN)(dN)#(mN)(mN)(mN)(mN)(fN)(mN)(fN)(mN)( |
| | IN)(mN)(mN)(rN)#(fN)(mN)(mN)(mN)(mN)(mG)(rU)(rU)(rG)(mU)(mA)(mG)(m |
| | C)(rU)(rC)(rC)(rC)(rU)(mU)(mU)(mC)(mU)(mC)(mA)(mU)(mU)#(mU)#(mC)#(m |
| | G)(SEQ ID NO: 20); |
| CR48-195 | (mN)#(mN)#(mN)#(mN)(mN)(mN)(dN)#(mN)(mN)(mN)(mN)(fN)(mN)(fN)(mN)( |
| | IN)(mN)(mN)(rN)#(mN)(IN)(mN)(mN)(mN)(mG)(rU)(rU)(rG)(mU)(mA)(mG)(m |
| | C)(rU)(rC)(rC)(rC)(rU)(mU)(mU)(mC)(mU)(mC)(mA)(mU)(mU)#(mU)#(mC)#(m |
| | G)(SEQ ID NO: 21); |
| CR48-196 | (mN)#(mN)#(mN)#(mN)(mN)(mN)(dN)#(mN)(mN)(mN)(mN)(mN)(mN)(fN)(mN) |
| | (fN)(mN)(mN)(rN)#(fN)(mN)(mN)(mN)(mN)(mG)(rU)(rU)(rG)(mU)(mA)(mG)(m |
| | C)(rU)(rC)(rC)(rC)(rU)(mU)(mU)(mC)(mU)(mC)(mA)(mU)(mU)#(mU)#(mC)#(m |
| | G)(SEQ ID NO: 22); |
| CR48-197 | (mN)#(mN)#(mN)#(mN)(mN)(mN)(dN)#(mN)(mN)(mN)(mN)(mN)(mN)(fN)(mN) |
| | (fN)(mN)(mN)(rN)#(mN)(fN)(mN)(mN)(mN)(mG)(rU)(rU)(rG)(mU)(mA)(mG)(m |
| | C)(rU)(rC)(rC)(rC)(rU)(mU)(mU)(mC)(mU)(mC)(mA)(mU)(mU)#(mU)#(mC)#(m |
| | G)(SEQ ID NO: 23); |
| CR48-198 | (mN)#(mN)#(mN)#(mN)(mN)(mN)(dN)#(mN)(mN)(mN)(mN)(fN)(mN)(fN)(mN)( |
| | fN)(mN)(mN)(mN)(fN)(mN)(mN)(mN)(mN)(mG)(rU)(rU)(rG)(mU)(mA)(mG)(m |
| | C)(rU)(rC)(rC)(rC)(rU)(mU)(mU)(mC)(mU)(mC)(mA)(mU)(mU)#(mU)#(mC)#(m |
| | G)(SEQ ID NO: 24); |
| CR48-199 | (mN)#(mN)#(mN)#(mN)(mN)(mN)(dN)#(mN)(mN)(mN)(mN)(fN)(mN)(fN)(mN)( |
| | fN)(mN)(mN)(mN)(mN)(fN)(mN)(mN)(mN)(mG)(rU)(rU)(rG)(mU)(mA)(mG)(m |
| | C)(rU)(rC)(rC)(rC)(rU)(mU)(mU)(mC)(mU)(mC)(mA)(mU)(mU)#(mU)#(mC)#(m |
| | G)(SEQ ID NO: 25); |
| CR48-200 | (mN)#(mN)#(mN)#(mN)(mN)(mN)(dN)#(mN)(mN)(mN)(mN)(mN)(mN)(fN)(mN) |
| | (fN)(mN)(mN)(mN)(fN)(mN)(mN)(mN)(mN)(mG)(rU)(rU)(rG)(mU)(mA)(mG)(m |
| | C)(rU)(rC)(rC)(rC)(rU)(mU)(mU)(mC)(mU)(mC)(mA)(mU)(mU)#(mU)#(mC)#(m |
| | G)(SEQ ID NO: 26); |
| CR48-201 | (mN)#(mN)#(mN)#(mN)(mN)(mN)(dN)#(mN)(mN)(mN)(mN)(mN)(mN)(fN)(mN) |
| | (fN)(mN)(mN)(mN)(mN)(fN)(mN)(mN)(mN)(mG)(rU)(rU)(rG)(mU)(mA)(mG)(m |
| | C)(rU)(rC)(rC)(rC)(rU)(mU)(mU)(mC)(mU)(mC)(mA)(mU)(mU)#(mU)#(mC)#(m |
| | G)(SEQ ID NO: 27); |
| CR48-202 | (mN)#(mN)#(mN)#(mN)(mN)(mN)(dN)#(mN)(mN)(mN)(mN)(fN)(mN)(fN)(mN)( |
| | fN)(mN)(mN)(fN)(fN)(mN)(mN)(mN)(mN)(mG)(rU)(rU)(rG)(mU)(mA)(mG)(mC) |
| | (rU)(rC)(rC)(rC)(rU)(mU)(mU)(mC)(mU)(mC)(mA)(mU)(mU)#(mU)#(mC)#(mG) |
| | (SEQ ID NO: 28); |
| CR48-203 | (mN)#(mN)#(mN)#(mN)(mN)(mN)(dN)#(mN)(mN)(mN)(mN)(fN)(mN)(fN)(mN)( |
| | fN)(mN)(mN)(fN)(mN)(fN)(mN)(mN)(mN)(mG)(rU)(rU)(rG)(mU)(mA)(mG)(mC) |
| | (rU)(rC)(rC)(rC)(rU)(mU)(mU)(mC)(mU)(mC)(mA)(mU)(mU)#(mU)#(mC)#(mG) |
| | (SEQ ID NO: 29); |
| CR48-204 | (mN)#(mN)#(mN)#(mN)(mN)(mN)(dN)#(mN)(mN)(mN)(mN)(mN)(mN)(fN)(mN) |
| | (fN)(mN)(mN)(fN)(fN)(mN)(mN)(mN)(mN)(mG)(rU)(rU)(rG)(mU)(mA)(mG)(mC |
| | )(rU)(rC)(rC)(rC)(rU)(mU)(mU)(mC)(mU)(mC)(mA)(mU)(mU)#(mU)#(mC)#(mG |
| | )(SEQ ID NO: 30); |
| CR48-205 | (mN)#(mN)#(mN)#(mN)(mN)(mN)(dN)#(mN)(mN)(mN)(mN)(mN)(mN)(fN)(mN) |
| | (fN)(mN)(mN)(fN)(mN)(fN)(mN)(mN)(mN)(mG)(rU)(rU)(rG)(mU)(mA)(mG)(mC |
| | )(rU)(rC)(rC)(rC)(rU)(mU)(mU)(mC)(mU)(mC)(mA)(mU)(mU)#(mU)#(mC)#(mG |
| | )(SEQ ID NO: 31); |
| CR48-213 | (mN)#(mN)#(mN)#(mN)(mN)(mN)(dN)#(mN)(mN)(mN)(mN)(mN)(mN)(fN)(mN) |
| | (IN)(mN)(mN)(rN)(rN)(rN)(mN)(rN)(rN)(mG)(dT)#(rU)(mG)(mU)(mA)(mG)(mC) |
| | (rU)(rC)(rC)(rC)(rU)(mU)(mU)(mC)(mU)(mC)(mA)(mU)(mU)#(mU)#(mC)#(mG) |
| | (SEQ ID NO: 32); |
| CR48-214 | (mN)#(mN)#(mN)#(mN)(mN)(mN)(dN)#(mN)(mN)(mN)(mN)(mN)(mN)(fN)(mN) |
| | (IN)(mN)(mN)(rN)(rN)(rN)(mN)(rN)(rN)(mG)(dT)#(rU)(mG)(mU)(mA)(mG)(mC) |
| | (rU)(rC)(mC)(rC)(rU)(mU)(mU)(mC)(mU)(mC)(mA)(mU)(mU)#(mU)#(mC)#(mG |
| | )(SEQ ID NO: 33); |
| CR48-215 | (mN)#(mN)#(mN)#(mN)(mN)(mN)(dN)#(mN)(mN)(mN)(mN)(mN)(mN)(fN)(mN) |
| | (IN)(mN)(mN)(rN)(rN)(rN)(mN)(rN)(rN)(mG)(dT)#(rU)(mG)(mU)(mA)(mG)(mC) |
| | (rU)(rC)(rC)(mC)(rU)(mU)(mU)(mC)(mU)(mC)(mA)(mU)(mU)#(mU)#(mC)#(mG |
| | )(SEQ ID NO: 34); |
| CR48-216 | (mN)#(mN)#(mN)#(mN)(mN)(mN)(dN)#(mN)(mN)(mN)(mN)(mN)(mN)(fN)(mN) |
| | (IN)(mN)(mN)(rN)(rN)(rN)(mN)(rN)(rN)(mG)(dT)#(rU)(mG)(mU)(mA)(mG)(mC) |
| | (rU)(rC)(mC)(mC)(rU)(mU)(mU)(mC)(mU)(mC)(mA)(mU)(mU)#(mU)#(mC)#(m |
| | G)(SEQ ID NO: 35); |
| CR48-217 | (mN)#(mN)#(mN)#(mN)(mN)(mN)(dN)#(mN)(mN)(mN)(mN)(mN)(mN)(fN)(mN) |
| | (fN)(mN)(mN)(rN)(rN)(rN)(mN)(rN)(rN)(mG)(rU)(rU)(rG)(mU)(mA)(mG)(mC)(d |
| | T)#(rC)(rC)(rC)(rU)(mU)(mU)(mC)(mU)(mC)(mA)(mU)(mU)#(mU)#(mC)#(mG) |
| | (SEQ ID NO: 36); |
| CR48-218 | (mN)#(mN)#(mN)#(mN)(mN)(mN)(dN)#(mN)(mN)(mN)(mN)(mN)(mN)(fN)(mN) |
| | (fN)(mN)(mN)(rN)(rN)(rN)(mN)(rN)(rN)(mG)(rU)(rU)(rG)(mU)(mA)(mG)(mC)(r |
| | U)(dC)#(rC)(rC)(rU)(mU)(mU)(mC)(mU)(mC)(mA)(mU)(mU)#(mU)#(mC)#(mG) |
| | (SEQ ID NO: 37); |
| CR48-219 | (mN)#(mN)#(mN)#(mN)(mN)(mN)(dN)#(mN)(mN)(mN)(mN)(mN)(mN)(fN)(mN) |
| | (fN)(mN)(mN)(rN)(rN)(rN)(mN)(rN)(rN)(mG)(rU)(rU)(rG)(mU)(mA)(mG)(mC)(r |
| | U)(rC)(dC)#(rC)(rU)(mU)(mU)(mC)(mU)(mC)(mA)(mU)(mU)#(mU)#(mC)#(mG) |
| | (SEQ ID NO: 38); |
| CR48-220 | (mN)#(mN)#(mN)#(mN)(mN)(mN)(dN)#(mN)(mN)(mN)(mN)(mN)(mN)(fN)(mN) |
| | (fN)(mN)(mN)(rN)(rN)(rN)(mN)(rN)(rN)(mG)(rU)(rU)(rG)(mU)(mA)(mG)(mC)(r |
| | U)(rC)(rC)(dC)#(rU)(mU)(mU)(mC)(mU)(mC)(mA)(mU)(mU)#(mU)#(mC)#(mG) |
| | (SEQ ID NO: 39); |
| CR48-221 | (mN)#(mN)#(mN)#(mN)(mN)(mN)(dN)#(mN)(mN)(mN)(mN)(mN)(mN)(fN)(mN) |
| | (fN)(mN)(mN)(rN)(rN)(rN)(mN)(rN)(rN)(mG)(rU)(rU)(rG)(mU)(mA)(mG)(mC)(r |
| | U)(rC)(rC)(rC)(dT)#(mU)(mU)(mC)(mU)(mC)(mA)(mU)(mU)#(mU)#(mC)#(mG) |
| | (SEQ ID NO: 40); |
| CR48-222 | (mN)#(mN)#(mN)#(mN)(mN)(mN)(dN)#(mN)(mN)(mN)(mN)(mN)(mN)(fN)(mN) |
| | (fN)(mN)(mN)(rN)(rN)(rN)(mN)(rN)(rN)(mG)(rU)(rU)(rG)(mU)(mA)(mG)(mC)(d |
| | T)#(rC)(dC)#(rC)(dT)#(mU)(mU)(mC)(mU)(mC)(mA)(mU)(mU)#(mU)#(mC)#(m |
| | G)(SEQ ID NO: 41); |
| CR48-223 | (mN)#(mN)#(mN)#(mN)(mN)(mN)(dN)#(mN)(mN)(mN)(mN)(mN)(mN)(fN)(mN) |
| | (fN)(mN)(mN)(rN)(rN)(rN)(mN)(rN)(rN)(mG)(dT)#(rU)(rG)(mU)(mA)(mG)(mC)( |
| | dT)#(dC)#(dC)#(rC)(dT)#(mU)(mU)(mC)(mU)(mC)(mA)(mU)(mU)#(mU)#(mC)# |
| | (mG)(SEQ ID NO: 42); |
| CR48-224 | (mN)#(mN)#(mN)#(mN)(mN)(mN)(dN)#(mN)(mN)(mN)(mN)(mN)(mN)(fN)(mN) |
| | (IN)(mN)(mN)(rN)(rN)(rN)(mN)(rN)(rN)(mG)(dT)#(rU)(mG)(mU)(mA)(mG)(mC) |
| | (dT)#(rC)(mC)(rC)(dT)#(mU)(mU)(mC)(mU)(mC)(mA)(mU)(mU)#(mU)#(mC)#( |
| | mG)(SEQ ID NO: 43); |
| CR48-225 | (mN)#(mN)#(mN)#(mN)(mN)(mN)(dN)#(mN)(mN)(mN)(mN)(mN)(mN)(fN)(mN) |
| | (IN)(mN)(mN)(rN)(rN)(rN)(mN)(rN)(rN)(mG)(dT)#(rU)(mG)(mU)(mA)(mG)(mC) |
| | (dT)#(rC)(dC)#(mC)(dT)#(mU)(mU)(mC)(mU)(mC)(mA)(mU)(mU)#(mU)#(mC)# |
| | (mG)(SEQ ID NO: 44); |
| CR48-226 | |
| | (fN)(mN)(mN)(rN)(rN)(rN)(mN)(rN)(rN)(mG)(dT)#(rU)(mG)(mU)(mA)(mG)(mC) |
| | (dT)#(rC)(mC)(mC)(dT)#(mU)(mU)(mC)(mU)(mC)(mA)(mU)(mU)#(mU)#(mC)#( |
| | mG)(SEQ ID NO: 45); |
| CR48-227 | (mN)#(mN)#(mN)#(mN)(mN)(mN)(dN)#(mN)(mN)(mN)(mN)(mN)(mN)(fN)(mN) |
| | (IN)(mN)(mN)(rN)(rN)(rN)(mN)(rN)(rN)(mG)(dT)#(rU)(mG)(mU)(mA)(mG)(mC) |
| | (dT)#(dC)#(mC)(mC)(dT)#(mU)(mU)(mC)(mU)(mC)(mA)(mU)(mU)#(mU)#(mC) |
| | #(mG)(SEQ ID NO: 46); |
| | (mN)#(mN)#(mN)#(mN)(mN)(mN)(dN)#(mN)(mN)(mN)(mN)(fN)(mN)(fN)(mN)( |
| CR48-199- | IN)(mN)(mN)(mN)(mN)(IN)(mN)(mN)(mN)(mG)(rU)(rU)(mG)(mU)(mA)(mG)(m |
| V1.1 | C)(rU)(rC)(rC)(dC)#(rU)(mU)(mU)(mC)(mU)(mC)(mA)(mU)(mU)#(mU)#(mC)#( |
| | mG)(SEQ ID NO: 47); |
| | (mN)#(mN)#(mN)#(mN)(mN)(mN)(dN)#(mN)(mN)(mN)(mN)(fN)(mN)(fN)(mN)( |
| CR48-199- | IN)(mN)(mN)(mN)(mN)(IN)(mN)(mN)(mN)(mG)(rU)(rU)(mG)(mU)(mA)(mG)(m |
| V1.2 | C)(rU)(rC)(dC)#(rC)(rU)(mU)(mU)(mC)(mU)(mC)(mA)(mU)(mU)#(mU)#(mC)#( |
| | mG)(SEQ ID NO: 48); |
| | (mN)#(mN)#(mN)#(mN)(mN)(mN)(dN)#(mN)(mN)(mN)(mN)(fN)(mN)(fN)(mN)( |
| CR48-199- | IN)(mN)(mN)(mN)(mN)(IN)(mN)(mN)(mN)(mG)(rU)(rU)(mG)(mU)(mA)(mG)(m |
| V1.3 | C)(rU)(rC)(rC)(rC)(dT)#(mU)(mU)(mC)(mU)(mC)(mA)(mU)(mU)#(mU)#(mC)#( |
| | mG)(SEQ ID NO: 49); |
| | (mN)#(mN)#(mN)#(mN)(mN)(mN)(dN)#(mN)(mN)(mN)(mN)(fN)(mN)(fN)(mN)( |
| CR48-199- | IN)(mN)(mN)(mN)(mN)(IN)(mN)(mN)(mN)(mG)(rU)(rU)(mG)(mU)(mA)(mG)(m |
| V1.4 | C)(rU)(rC)(mC)(rC)(rU)(mU)(mU)(mC)(mU)(mC)(mA)(mU)(mU)#(mU)#(mC)#( |
| | mG)(SEQ ID NO: 50); |
| | (mN)#(mN)#(mN)#(mN)(mN)(mN)(dN)#(mN)(mN)(mN)(mN)(fN)(mN)(fN)(mN)( |
| CR48-199- | IN)(mN)(mN)(mN)(mN)(IN)(mN)(mN)(mN)(mG)(rU)(rU)(mG)(mU)(mA)(mG)(m |
| V1.5 | C)(rU)(rC)(dC)#(dC)#(rU)(mU)(mU)(mC)(mU)(mC)(mA)(mU)(mU)#(mU)#(mC)# |
| | (mG)(SEQ ID NO: 51); |
| | (mN)#(mN)#(mN)#(mN)(mN)(mN)(dN)#(mN)(mN)(mN)(mN)(fN)(mN)(fN)(mN)( |
| CR48-199- | IN)(mN)(mN)(mN)(mN)(IN)(mN)(mN)(mN)(mG)(rU)(rU)(mG)(mU)(mA)(mG)(m |
| V1.6 | C)(rU)(rC)(dC)#(rC)(dT)#(mU)(mU)(mC)(mU)(mC)(mA)(mU)(mU)#(mU)#(mC)# |
| | (mG)(SEQ ID NO: 52); |
| | (mN)#(mN)#(mN)#(mN)(mN)(mN)(dN)#(mN)(mN)(mN)(mN)(fN)(mN)(fN)(mN)( |
| CR48-199- | IN)(mN)(mN)(mN)(mN)(IN)(mN)(mN)(mN)(mG)(rU)(rU)(mG)(mU)(mA)(mG)(m |
| V1.7 | C)(rU)(rC)(dC)#(dC)#(dT)#(mU)(mU)(mC)(mU)(mC)(mA)(mU)(mU)#(mU)#(mC |
| | )#(mG)(SEQ ID NO: 53); |
| | (mN)#(mN)#(mN)#(mN)(mN)(mN)(dN)#(mN)(mN)(mN)(mN)(fN)(mN)(fN)(mN)( |
| CR48-199- | IN)(mN)(mN)(mN)(mN)(IN)(mN)(mN)(mN)(mG)(rU)(rU)(mG)(mU)(mA)(mG)(m |
| V1.8 | C)(rU)(rC)(mC)(dC)#(rU)(mU)(mU)(mC)(mU)(mC)(mA)(mU)(mU)#(mU)#(mC)# |
| | (mG)(SEQ ID NO: 54); |
| | (mN)#(mN)#(mN)#(mN)(mN)(mN)(dN)#(mN)(mN)(mN)(mN)(fN)(mN)(fN)(mN)( |
| CR48-199- | IN)(mN)(mN)(mN)(mN)(IN)(mN)(mN)(mN)(mG)(rU)(rU)(mG)(mU)(mA)(mG)(m |
| V1.9 | C)(rU)(rC)(mC)(rC)(dT)#(mU)(mU)(mC)(mU)(mC)(mA)(mU)(mU)#(mU)#(mC)#( |
| | mG)(SEQ ID NO: 55); |
| | (mN)#(mN)#(mN)#(mN)(mN)(mN)(dN)#(mN)(mN)(mN)(mN)(fN)(mN)(fN)(mN)( |
| CR48-199- | IN)(mN)(mN)(mN)(mN)(IN)(mN)(mN)(mN)(mG)(rU)(rU)(mG)(mU)(mA)(mG)(m |
| Vl.10 | C)(rU)(rC)(mC)(dC)#(dT)#(mU)(mU)(mC)(mU)(mC)(mA)(mU)(mU)#(mU)#(mC) |
| | #(mG)(SEQ ID NO: 56); |
| | (mN)#(mN)#(mN)#(mN)(mN)(mN)(dN)#(mN)(mN)(mN)(mN)(fN)(mN)(fN)(mN)( |
| CR48-199- | IN)(mN)(mN)(mN)(mN)(IN)(mN)(mN)(mN)(mG)(rU)(rU)(mG)(mU)(mA)(mG)(m |
| V1.11 | C)(rU)(rC)(mC)(mC)(rU)(mU)(mU)(mC)(mU)(mC)(mA)(mU)(mU)#(mU)#(mC)#( |
| | mG)(SEQ ID NO: 57); |
| | (mN)#(mN)#(mN)#(mN)(mN)(mN)(dN)#(mN)(mN)(mN)(mN)(fN)(mN)(fN)(mN)( |
| CR48-199- | IN)(mN)(mN)(mN)(mN)(IN)(mN)(mN)(mN)(mG)(rU)(rU)(mG)(mU)(mA)(mG)(m |
| V1.12 | C)(rU)(rC)(mC)(mC)(dT)#(mU)(mU)(mC)(mU)(mC)(mA)(mU)(mU)#(mU)#(mC) |
| | #(mG)(SEQ ID NO: 58); |
| | (mN)#(mN)#(mN)#(mN)(mN)(mN)(dN)#(mN)(mN)(mN)(mN)(fN)(mN)(fN)(mN)( |
| CR48-199- | fN)(mN)(mN)(mN)(mN)(fN)(mN)(mN)(mN)(mG)(rU)(rU)(mG)(mU)(mA)(mG)(m |
| V1.13 | C)(dT)#(rC)(rC)(dC)#(rU)(mU)(mU)(mC)(mU)(mC)(mA)(mU)(mU)#(mU)#(mC)# |
| | (mG)(SEQ ID NO: 59); |
| | (mN)#(mN)#(mN)#(mN)(mN)(mN)(dN)#(mN)(mN)(mN)(mN)(fN)(mN)(fN)(mN)( |
| CR48-199- | fN)(mN)(mN)(mN)(mN)(fN)(mN)(mN)(mN)(mG)(rU)(rU)(mG)(mU)(mA)(mG)(m |
| Vl.14 | C)(dT)#(rC)(dC)#(rC)(rU)(mU)(mU)(mC)(mU)(mC)(mA)(mU)(mU)#(mU)#(mC)# |
| | (mG)(SEQ ID NO: 60); |
| | (mN)#(mN)#(mN)#(mN)(mN)(mN)(dN)#(mN)(mN)(mN)(mN)(fN)(mN)(fN)(mN)( |
| CR48-199- | fN)(mN)(mN)(mN)(mN)(fN)(mN)(mN)(mN)(mG)(rU)(rU)(mG)(mU)(mA)(mG)(m |
| V1.15 | C)(dT)#(rC)(rC)(rC)(dT)#(mU)(mU)(mC)(mU)(mC)(mA)(mU)(mU)#(mU)#(mC)# |
| | (mG)(SEQ ID NO: 61); |
| | (mN)#(mN)#(mN)#(mN)(mN)(mN)(dN)#(mN)(mN)(mN)(mN)(fN)(mN)(fN)(mN)( |
| CR48-199- | fN)(mN)(mN)(mN)(mN)(fN)(mN)(mN)(mN)(mG)(rU)(rU)(mG)(mU)(mA)(mG)(m |
| V1.16 | C)(dT)#(rC)(mC)(rC)(rU)(mU)(mU)(mC)(mU)(mC)(mA)(mU)(mU)#(mU)#(mC)#( |
| | mG)(SEQ ID NO: 62); |
| | (mN)#(mN)#(mN)#(mN)(mN)(mN)(dN)#(mN)(mN)(mN)(mN)(fN)(mN)(fN)(mN)( |
| CR48-199- | fN)(mN)(mN)(mN)(mN)(fN)(mN)(mN)(mN)(mG)(rU)(rU)(mG)(mU)(mA)(mG)(m |
| V1.17 | C)(dT)#(rC)(dC)#(dC)#(rU)(mU)(mU)(mC)(mU)(mC)(mA)(mU)(mU)#(mU)#(mC |
| | )#(mG)(SEQ ID NO: 63); |
| | (mN)#(mN)#(mN)#(mN)(mN)(mN)(dN)#(mN)(mN)(mN)(mN)(fN)(mN)(fN)(mN)( |
| CR48-199- | fN)(mN)(mN)(mN)(mN)(fN)(mN)(mN)(mN)(mG)(rU)(rU)(mG)(mU)(mA)(mG)(m |
| V1.18 | C)(dT)#(rC)(dC)#(rC)(dT)#(mU)(mU)(mC)(mU)(mC)(mA)(mU)(mU)#(mU)#(mC) |
| | #(mG)(SEQ ID NO: 64); |
| | (mN)#(mN)#(mN)#(mN)(mN)(mN)(dN)#(mN)(mN)(mN)(mN)(fN)(mN)(fN)(mN)( |
| CR48-199- | fN)(mN)(mN)(mN)(mN)(fN)(mN)(mN)(mN)(mG)(rU)(rU)(mG)(mU)(mA)(mG)(m |
| V1.19 | C)(dT)#(rC)(dC)#(dC)#(dT)#(mU)(mU)(mC)(mU)(mC)(mA)(mU)(mU)#(mU)#(m |
| | C)#(mG)(SEQ ID NO: 65); |
| | (mN)#(mN)#(mN)#(mN)(mN)(mN)(dN)#(mN)(mN)(mN)(mN)(fN)(mN)(fN)(mN)( |
| CR48-199- | fN)(mN)(mN)(mN)(mN)(fN)(mN)(mN)(mN)(mG)(rU)(rU)(mG)(mU)(mA)(mG)(m |
| V1.20 | C)(dT)#(rC)(mC)(dC)#(rU)(mU)(mU)(mC)(mU)(mC)(mA)(mU)(mU)#(mU)#(mC) |
| | #(mG)(SEQ ID NO: 66); |
| | (mN)#(mN)#(mN)#(mN)(mN)(mN)(dN)#(mN)(mN)(mN)(mN)(fN)(mN)(fN)(mN)( |
| CR48-199- | fN)(mN)(mN)(mN)(mN)(fN)(mN)(mN)(mN)(mG)(rU)(rU)(mG)(mU)(mA)(mG)(m |
| V1.21 | C)(dT)#(rC)(mC)(rC)(dT)#(mU)(mU)(mC)(mU)(mC)(mA)(mU)(mU)#(mU)#(mC) |
| | #(mG)(SEQ ID NO: 67); |
| | (mN)#(mN)#(mN)#(mN)(mN)(mN)(dN)#(mN)(mN)(mN)(mN)(fN)(mN)(fN)(mN)( |
| CR48-199- | fN)(mN)(mN)(mN)(mN)(fN)(mN)(mN)(mN)(mG)(rU)(rU)(mG)(mU)(mA)(mG)(m |
| V1.22 | C)(dT)#(rC)(mC)(dC)#(dT)#(mU)(mU)(mC)(mU)(mC)(mA)(mU)(mU)#(mU)#(m |
| | C)#(mG)(SEQ ID NO: 68); |
| | (mN)#(mN)#(mN)#(mN)(mN)(mN)(dN)#(mN)(mN)(mN)(mN)(fN)(mN)(fN)(mN)( |
| CR48-199- | fN)(mN)(mN)(mN)(mN)(fN)(mN)(mN)(mN)(mG)(rU)(rU)(mG)(mU)(mA)(mG)(m |
| V1.23 | C)(dT)#(rC)(mC)(mC)(rU)(mU)(mU)(mC)(mU)(mC)(mA)(mU)(mU)#(mU)#(mC) |
| | #(mG)(SEQ ID NO: 69); |
| | (mN)#(mN)#(mN)#(mN)(mN)(mN)(dN)#(mN)(mN)(mN)(mN)(fN)(mN)(fN)(mN)( |
| CR48-199- | fN)(mN)(mN)(mN)(mN)(fN)(mN)(mN)(mN)(mG)(rU)(rU)(mG)(mU)(mA)(mG)(m |
| V1.24 | C)(dT)#(rC)(mC)(mC)(dT)#(mU)(mU)(mC)(mU)(mC)(mA)(mU)(mU)#(mU)#(mC |
| | )#(mG)(SEQ ID NO: 70); |
| | (mN)#(mN)#(mN)#(mN)(mN)(mN)(dN)#(mN)(mN)(mN)(mN)(fN)(mN)(fN)(mN)( |
| CR48-199- | fN)(mN)(mN)(mN)(mN)(fN)(mN)(mN)(mN)(mG)(dT)#(rU)(mG)(mU)(mA)(mG)( |
| V1.25 | mC)(dT)#(rC)(rC)(dC)#(rU)(mU)(mU)(mC)(mU)(mC)(mA)(mU)(mU)#(mU)#(mC |
| | )#(mG)(SEQ ID NO: 71); |
| | (mN)#(mN)#(mN)#(mN)(mN)(mN)(dN)#(mN)(mN)(mN)(mN)(fN)(mN)(fN)(mN)( |
| CR48-199- | fN)(mN)(mN)(mN)(mN)(fN)(mN)(mN)(mN)(mG)(dT)#(rU)(mG)(mU)(mA)(mG)( |
| V1.26 | mC)(dT)#(rC)(dC)#(rC)(rU)(mU)(mU)(mC)(mU)(mC)(mA)(mU)(mU)#(mU)#(mC |
| | )#(mG)(SEQ ID NO: 72); |
| | (mN)#(mN)#(mN)#(mN)(mN)(mN)(dN)#(mN)(mN)(mN)(mN)(fN)(mN)(fN)(mN)( |
| CR48-199- | fN)(mN)(mN)(mN)(mN)(fN)(mN)(mN)(mN)(mG)(dT)#(rU)(mG)(mU)(mA)(mG)( |
| V1.27 | mC)(dT)#(rC)(rC)(rC)(dT)#(mU)(mU)(mC)(mU)(mC)(mA)(mU)(mU)#(mU)#(mC |
| | )#(mG)(SEQ ID NO: 73); |
| | (mN)#(mN)#(mN)#(mN)(mN)(mN)(dN)#(mN)(mN)(mN)(mN)(fN)(mN)(fN)(mN)( |
| CR48-199- | fN)(mN)(mN)(mN)(mN)(fN)(mN)(mN)(mN)(mG)(dT)#(rU)(mG)(mU)(mA)(mG)( |
| V1.28 | mC)(dT)#(rC)(mC)(rC)(rU)(mU)(mU)(mC)(mU)(mC)(mA)(mU)(mU)#(mU)#(mC) |
| | #(mG)(SEQ ID NO: 74); |
| | (mN)#(mN)#(mN)#(mN)(mN)(mN)(dN)#(mN)(mN)(mN)(mN)(fN)(mN)(IN)(mN)( |
| CR48-199- | IN)(mN)(mN)(mN)(mN)(fN)(mN)(mN)(mN)(mG)(dT)#(rU)(mG)(mU)(mA)(mG)( |
| V1.29 | mC)(dT)#(rC)(dC)#(dC)#(rU)(mU)(mU)(mC)(mU)(mC)(mA)(mU)(mU)#(mU)#(m |
| | C)#(mG)(SEQ ID NO: 75); |
| | (mN)#(mN)#(mN)#(mN)(mN)(mN)(dN)#(mN)(mN)(mN)(mN)(fN)(mN)(IN)(mN)( |
| CR48-199- | IN)(mN)(mN)(mN)(mN)(fN)(mN)(mN)(mN)(mG)(dT)#(rU)(mG)(mU)(mA)(mG)( |
| V1.30 | mC)(dT)#(rC)(dC)#(rC)(dT)#(mU)(mU)(mC)(mU)(mC)(mA)(mU)(mU)#(mU)#(m |
| | C)#(mG)(SEQ ID NO: 76); |
| | (mN)#(mN)#(mN)#(mN)(mN)(mN)(dN)#(mN)(mN)(mN)(mN)(fN)(mN)(IN)(mN)( |
| CR48-199- | IN)(mN)(mN)(mN)(mN)(fN)(mN)(mN)(mN)(mG)(dT)#(rU)(mG)(mU)(mA)(mG)( |
| V1.31 | mC)(dT)#(rC)(dC)#(dC)#(dT)#(mU)(mU)(mC)(mU)(mC)(mA)(mU)(mU)#(mU)#( |
| | mC)#(mG)(SEQ ID NO: 77); |
| | (mN)#(mN)#(mN)#(mN)(mN)(mN)(dN)#(mN)(mN)(mN)(mN)(fN)(mN)(IN)(mN)( |
| CR48-199- | IN)(mN)(mN)(mN)(mN)(fN)(mN)(mN)(mN)(mG)(dT)#(rU)(mG)(mU)(mA)(mG)( |
| V1.32 | mC)(dT)#(rC)(mC)(dC)#(rU)(mU)(mU)(mC)(mU)(mC)(mA)(mU)(mU)#(mU)#(m |
| | C)#(mG)(SEQ ID NO: 78); |
| | (mN)#(mN)#(mN)#(mN)(mN)(mN)(dN)#(mN)(mN)(mN)(mN)(fN)(mN)(IN)(mN)( |
| CR48-199- | IN)(mN)(mN)(mN)(mN)(fN)(mN)(mN)(mN)(mG)(dT)#(rU)(mG)(mU)(mA)(mG)( |
| V1.33 | mC)(dT)#(rC)(mC)(rC)(dT)#(mU)(mU)(mC)(mU)(mC)(mA)(mU)(mU)#(mU)#(m |
| | C)#(mG)(SEQ ID NO: 79); |
| | (mN)#(mN)#(mN)#(mN)(mN)(mN)(dN)#(mN)(mN)(mN)(mN)(fN)(mN)(IN)(mN)( |
| CR48-199- | IN)(mN)(mN)(mN)(mN)(fN)(mN)(mN)(mN)(mG)(dT)#(rU)(mG)(mU)(mA)(mG)( |
| V1.34 | mC)(dT)#(rC)(mC)(dC)#(dT)#(mU)(mU)(mC)(mU)(mC)(mA)(mU)(mU)#(mU)#( |
| | mC)#(mG)(SEQ ID NO: 80); |
| | (mN)#(mN)#(mN)#(mN)(mN)(mN)(dN)#(mN)(mN)(mN)(mN)(fN)(mN)(IN)(mN)( |
| CR48-199- | IN)(mN)(mN)(mN)(mN)(fN)(mN)(mN)(mN)(mG)(dT)#(rU)(mG)(mU)(mA)(mG)( |
| V1.35 | mC)(dT)#(rC)(mC)(mC)(rU)(mU)(mU)(mC)(mU)(mC)(mA)(mU)(mU)#(mU)#(m |
| | C)#(mG)(SEQ ID NO: 81); |
| | (mN)#(mN)#(mN)#(mN)(mN)(mN)(dN)#(mN)(mN)(mN)(mN)(fN)(mN)(IN)(mN)( |
| CR48-199- | IN)(mN)(mN)(mN)(mN)(fN)(mN)(mN)(mN)(mG)(dT)#(rU)(mG)(mU)(mA)(mG)( |
| V1.36 | mC)(dT)#(rC)(mC)(mC)(dT)#(mU)(mU)(mC)(mU)(mC)(mA)(mU)(mU)#(mU)#(m |
| | C)#(mG)(SEQ ID NO: 82); |
| | (mN)#(mN)#(mN)#(mN)(mN)(mN)(dN)#(mN)(mN)(mN)(mN)(fN)(mN)(IN)(mN)( |
| CR48-203- | fN)(mN)(mN)(IN)(mN)(fN)(mN)(mN)(mN)(mG)(rU)(rU)(mG)(mU)(mA)(mG)(m |
| V1.7 | C)(rU)(rC)(dC)#(dC)#(dT)#(mU)(mU)(mC)(mU)(mC)(mA)(mU)(mU)#(mU)#(mC |
| | )#(mG)(SEQ ID NO: 83); |
| | (mN)#(mN)#(mN)#(mN)(mN)(mN)(dN)#(mN)(mN)(mN)(mN)(fN)(mN)(IN)(mN)( |
| CR48-203- | fN)(mN)(mN)(IN)(mN)(fN)(mN)(mN)(mN)(mG)(rU)(rU)(mG)(mU)(mA)(mG)(m |
| Vl.10 | C)(rU)(rC)(mC)(dC)#(dT)#(mU)(mU)(mC)(mU)(mC)(mA)(mU)(mU)#(mU)#(mC) |
| | #(mG)(SEQ ID NO: 84); |
| | (mN)#(mN)#(mN)#(mN)(mN)(mN)(dN)#(mN)(mN)(mN)(mN)(fN)(mN)(IN)(mN)( |
| CR48-203- | fN)(mN)(mN)(IN)(mN)(fN)(mN)(mN)(mN)(mG)(rU)(rU)(mG)(mU)(mA)(mG)(m |
| V1.12 | C)(rU)(rC)(mC)(mC)(dT)#(mU)(mU)(mC)(mU)(mC)(mA)(mU)(mU)#(mU)#(mC) |
| | #(mG)(SEQ ID NO: 85); |
| | (mN)#(mN)#(mN)#(mN)(mN)(mN)(dN)#(mN)(mN)(mN)(mN)(fN)(mN)(IN)(mN)( |
| CR48-203- | fN)(mN)(mN)(IN)(mN)(fN)(mN)(mN)(mN)(mG)(rU)(rU)(mG)(mU)(mA)(mG)(m |
| V1.18 | C)(dT)#(rC)(dC)#(rC)(dT)#(mU)(mU)(mC)(mU)(mC)(mA)(mU)(mU)#(mU)#(mC) |
| | #(mG)(SEQ ID NO: 86); |
| | (mN)#(mN)#(mN)#(mN)(mN)(mN)(dN)#(mN)(mN)(mN)(mN)(fN)(mN)(fN)(mN)( |
| CR48-203- | fN)(mN)(mN)(IN)(mN)(IN)(mN)(mN)(mN)(mG)(rU)(rU)(mG)(mU)(mA)(mG)(m |
| V1.19 | C)(dT)#(rC)(dC)#(dC)#(dT)#(mU)(mU)(mC)(mU)(mC)(mA)(mU)(mU)#(mU)#(m |
| | C)#(mG)(SEQ ID NO: 87); |
| | (mN)#(mN)#(mN)#(mN)(mN)(mN)(dN)#(mN)(mN)(mN)(mN)(fN)(mN)(IN)(mN)( |
| CR48-203- | fN)(mN)(mN)(IN)(mN)(fN)(mN)(mN)(mN)(mG)(rU)(rU)(mG)(mU)(mA)(mG)(m |
| V1.22 | C)(dT)#(rC)(mC)(dC)#(dT)#(mU)(mU)(mC)(mU)(mC)(mA)(mU)(mU)#(mU)#(m |
| | C)#(mG)(SEQ ID NO: 88); |
| | (mN)#(mN)#(mN)#(mN)(mN)(mN)(dN)#(mN)(mN)(mN)(mN)(fN)(mN)(IN)(mN)( |
| CR48-203- | fN)(mN)(mN)(IN)(mN)(fN)(mN)(mN)(mN)(mG)(rU)(rU)(mG)(mU)(mA)(mG)(m |
| V1.24 | C)(dT)#(rC)(mC)(mC)(dT)#(mU)(mU)(mC)(mU)(mC)(mA)(mU)(mU)#(mU)#(mC |
| | )#(mG)(SEQ ID NO: 89); |
| | (mN)#(mN)#(mN)#(mN)(mN)(mN)(dN)#(mN)(mN)(mN)(mN)(fN)(mN)(IN)(mN)( |
| CR48-203- | IN)(mN)(mN)(IN)(mN)(IN)(mN)(mN)(mN)(mG)(dT)#(rU)(mG)(mU)(mA)(mG)(m |
| V1.30 | C)(dT)#(rC)(dC)#(rC)(dT)#(mU)(mU)(mC)(mU)(mC)(mA)(mU)(mU)#(mU)#(mC) |
| | #(mG)(SEQ ID NO: 90); |
| | (mN)#(mN)#(mN)#(mN)(mN)(mN)(dN)#(mN)(mN)(mN)(mN)(fN)(mN)(IN)(mN)( |
| CR48-203- | IN)(mN)(mN)(IN)(mN)(IN)(mN)(mN)(mN)(mG)(dT)#(rU)(mG)(mU)(mA)(mG)(m |
| V1.31 | C)(dT)#(rC)(dC)#(dC)#(dT)#(mU)(mU)(mC)(mU)(mC)(mA)(mU)(mU)#(mU)#(m |
| | C)#(mG)(SEQ ID NO: 91); |
| | (mN)#(mN)#(mN)#(mN)(mN)(mN)(dN)#(mN)(mN)(mN)(mN)(fN)(mN)(IN)(mN)( |
| CR48-203- | IN)(mN)(mN)(fN)(mN)(fN)(mN)(mN)(mN)(mG)(dT)#(rU)(mG)(mU)(mA)(mG)(m |
| V1.34 | C)(dT)#(rC)(mC)(dC)#(dT)#(mU)(mU)(mC)(mU)(mC)(mA)(mU)(mU)#(mU)#(m |
| | C)#(mG)(SEQ ID NO: 92); or |
| | (mN)#(mN)#(mN)#(mN)(mN)(mN)(dN)#(mN)(mN)(mN)(mN)(fN)(mN)(IN)(mN)( |
| CR48-203- | IN)(mN)(mN)(fN)(mN)(fN)(mN)(mN)(mN)(mG)(dT)#(rU)(mG)(mU)(mA)(mG)(m |
| V1.36 | C)(dT)#(rC)(mC)(mC)(dT)#(mU)(mU)(mC)(mU)(mC)(mA)(mU)(mU)#(mU)#(mC |
| | )#(mG)(SEQ ID NO: 93), |

[0025] wherein rN=RNA, mN=2′-O-methyl RNA, fN=2′-fluoro RNA, dN=2′-deoxy RNA, N #N=phosphorothioate linkage, and N=any nucleotide.

[0026] In certain embodiments, the tracrRNA portion comprises one or more modified nucleotides each independently selected from a modification of a ribose group, a phosphate group, a nucleobase, or a combination thereof.

[0027] In certain embodiments, each modification of the ribose group is independently selected from the group consisting of 2′-O-methyl, 2′-fluoro, 2′-deoxy, 2′-O-(2-methoxyethyl) (MOE), 2′-NH₂ (2′-amino), 4′-thio, a bicyclic nucleotide, a locked nucleic acid (LNA), a 2′-(S)-constrained ethyl (S-cEt), a constrained MOE, and a 2′-O,4′-C-aminomethylene bridged nucleic acid (2′,4′-BNA^{N} c).

[0028] In certain embodiments, at least 40% of the ribose groups are chemically modified. In certain embodiments, at least 80% of the ribose groups are chemically modified. In certain embodiments, 100% of the ribose groups are chemically modified.

[0029] In certain embodiments, each modification of the phosphate group is independently selected from the group consisting of a phosphorothioate, phosphonoacetate (PACE), thiophosphonoacetate (thioPACE), amide, triazole, phosphonate, and phosphotriester modification.

[0030] In certain embodiments, each modification of the nucleobase group is independently selected from the group consisting of 2-thiouridine, 4-thiouridine, N⁶-methyladenosine, pseudouridine, 2,6-diaminopurine, inosine, thymidine, 5-methylcytosine, 5-substituted pyrimidine, isoguanine, isocytosine, and halogenated aromatic groups.

[0031] In certain embodiments, the tracrRNA portion comprises at least 40% modified nucleotides. In certain embodiments, the tracrRNA portion comprises at least 80% modified nucleotides. In certain embodiments, the tracrRNA portion comprises at least 90% modified nucleotides. In certain embodiments, the tracrRNA portion comprises 100% chemically modified nucleotides.

[0032] In certain embodiments, the chemically modified Nme gRNA comprises a tracrRNA portion modification pattern selected from any one of:

(SEQ ID NO: 94)
(mC)#(mG)#(mA)#(rA)(rA)(rU)(rG)(rA)(rG)
(rA)(rA)(rC)(rC)(rG)(rU)(rU)(rG)(rC)(rU
)(rA)(rC)(rA)(rA)(rU)(rA)(rA)(rG)(rG)(r
C)(rC)(rG)(rU)(rC)(rU)(rG)(rA)(rA)(rA)(
rA)(rG)(rA)(rU)(rG)(rU)(rG)(rC)(rC)(rG)
(rC)(rA)(rA)(rC)(rG)(rC)(rU)(rC)(rU)(rG
)(rC)(rC)(rC)(rC)(rU)(rU)(rA)(rA)(rA)(r
G)(rC)(rU)(rC)(rC)(rU)(rG)(rC)(rU)(rU)(
rU)(rA)(rA)(rG)(rG)(rG)(rG)(rC)(rA)(rU)
(rC)(rG)(rU)#(mU)#(mU)#(mA)
(TR93-0);
(SEQ ID NO: 95)
(mC)#(mG)#(mA)#(rA)(rA)(rU)(rG)(rA)(rG)
(rA)(rA)(rC)(rC)(rG)(rU)(rU)(rG)(rC)(rU
)(rA)(rC)(rA)(rA)(rU)(rA)(rA)(rG)(rG)(r
C)(rC)(rG)(rU)(rC)(rU)(mG)(mA)(mA)(mA)(
rA)(rG)(rA)(rU)(rG)(rU)(rG)(rC)(rC)(rG)
(rC)(rA)(rA)(rC)(rG)(rC)(rU)(rC)(rU)(rG
)(rC)(rC)(rC)(rC)(rU)(rU)(rA)(rA)(rA)(r
G)(rC)(mU)(mC)(mC)(mU)(rG)(rC)(rU)(rU)(
rU)(rA)(rA)(rG)(rG)(rG)(rG)(rC)(rA)(rU)
(rC)(rG)(rU)#(mU)#(mU)#(mA)
(TR93-1);
(SEQ ID NO: 96)
(mC)#(mG)#(mA)#(mA)(mA)(mU)(mG)(mA)(mG)
(mA)(mA)(mC)(rC)(rG)(rU)(rU)(rG)(rC)(rU
)(rA)(rC)(rA)(rA)(rU)(rA)(rA)(rG)(rG)(r
C)(rC)(rG)(mU)(mC)(mU)(mG)(mA)(mA)(mA)(
mA)(mG)(rA)(rU)(rG)(rU)(rG)(rC)(rC)(rG)
(rC)(rA)(rA)(rC)(rG)(rC)(rU)(rC)(rU)(rG
)(rC)(rC)(mC)(mC)(mU)(mU)(mA)(mA)(mA)(m
G)(mC)(mU)(mC)(mC)(mU)(mG)(mC)(mU)(mU)(
mU)(mA)(mA)(mG)(mG)(rG)(rG)(rC)(rA)(rU)
(mC)(mG)(mU)#(mU)#(mU)#(mA)
(TR93-2), wherein rN = RNA, mN =
2′-O-methyl RNA, fN = 2′-fluoro RNA,
N#N = phosphorothioate linkage,
and N = any nucleotide.

[0033] In one aspect, the disclosure provides a chemically modified Neisseria meningitidis (Nme) guide RNA (gRNA) comprising: (a) a crRNA portion comprising (i) a guide sequence capable of hybridizing to a target polynucleotide sequence, and (ii) a repeat sequence; and (b) a tracrRNA portion comprising an anti-repeat nucleotide sequence that is complementary to the repeat sequence, wherein the tracrRNA portion comprises a modification pattern selected from anyone of:

(SEQ ID NO: 94)
(mC)#(mG)#(mA)#(rA)(rA)(rU)(rG)(rA)(rG)
(rA)(rA)(rC)(rC)(rG)(rU)(rU)(rG)(rC)(rU
)(rA)(rC)(rA)(rA)(rU)(rA)(rA)(rG)(rG)(r
C)(rC)(rG)(rU)(rC)(rU)(rG)(rA)(rA)(rA)(
rA)(rG)(rA)(rU)(rG)(rU)(rG)(rC)(rC)(rG)
(rC)(rA)(rA)(rC)(rG)(rC)(rU)(rC)(rU)(rG
)(rC)(rC)(rC)(rC)(rU)(rU)(rA)(rA)(rA)(r
G)(rC)(rU)(rC)(rC)(rU)(rG)(rC)(rU)(rU)(
rU)(rA)(rA)(rG)(rG)(rG)(rG)(rC)(rA)(rU)
(rC)(rG)(rU)#(mU)#(mU)#(mA)
(TR93-0);
(SEQ ID NO: 95)
(mC)#(mG)#(mA)#(rA)(rA)(rU)(rG)(rA)(rG)
(rA)(rA)(rC)(rC)(rG)(rU)(rU)(rG)(rC)(rU
)(rA)(rC)(rA)(rA)(rU)(rA)(rA)(rG)(rG)(r
C)(rC)(rG)(rU)(rC)(rU)(mG)(mA)(mA)(mA)(
rA)(rG)(rA)(rU)(rG)(rU)(rG)(rC)(rC)(rG)
(rC)(rA)(rA)(rC)(rG)(rC)(rU)(rC)(rU)(rG
)(rC)(rC)(rC)(rC)(rU)(rU)(rA)(rA)(rA)(r
G)(rC)(mU)(mC)(mC)(mU)(rG)(rC)(rU)(rU)(
rU)(rA)(rA)(rG)(rG)(rG)(rG)(rC)(rA)(rU)
(rC)(rG)(rU)#(mU)#(mU)#(mA)(TR93-1);
(SEQ ID NO: 96)
(mC)#(mG)#(mA)#(mA)(mA)(mU)(mG)(mA)(mG)
(mA)(mA)(mC)(rC)(rG)(rU)(rU)(rG)(rC)(rU
)(rA)(rC)(rA)(rA)(rU)(rA)(rA)(rG)(rG)(r
C)(rC)(rG)(mU)(mC)(mU)(mG)(mA)(mA)(mA)(
mA)(mG)(rA)(rU)(rG)(rU)(rG)(rC)(rC)(rG)
(rC)(rA)(rA)(rC)(rG)(rC)(rU)(rC)(rU)(rG
)(rC)(rC)(mC)(mC)(mU)(mU)(mA)(mA)(mA)(m
G)(mC)(mU)(mC)(mC)(mU)(mG)(mC)(mU)(mU)(
mU)(mA)(mA)(mG)(mG)(rG)(rG)(rC)(rA)(rU)
(mC)(mG)(mU)#(mU)#(mU)#(mA)
(TR93-2), wherein rN = RNA, mN =
2′-O-methyl RNA, IN = 2′-fluoro
RNA, N#N = phosphorothioate
linkage, and N = any
nucleotide.

[0034] In certain embodiments, the crRNA portion comprises one or more modified nucleotides each independently selected from a modification of a ribose group, a phosphate group, a nucleobase, or a combination thereof.

[0035] In certain embodiments, each modification of the ribose group is independently selected from the group consisting of 2′-O-methyl, 2′-fluoro, 2′-deoxy, 2′-O-(2-methoxyethyl) (MOE), 2′-NH₂ (2′-amino), 4′-thio, a bicyclic nucleotide, a locked nucleic acid (LNA), a 2′-(S)-constrained ethyl (S-cEt), a constrained MOE, and a 2′-O,4′-C-aminomethylene bridged nucleic acid (2′,4′-BNA^{NC}).

[0036] In certain embodiments, at least 50% of the ribose groups are chemically modified. In certain embodiments, at least 80% of the ribose groups are chemically modified. In certain embodiments, 100% of the ribose groups are chemically modified.

[0037] In certain embodiments, each modification of the phosphate group is independently selected from the group consisting of a phosphorothioate, phosphonoacetate (PACE), thiophosphonoacetate (thioPACE), amide, triazole, phosphonate, or phosphotriester modification.

[0038] In certain embodiments, each modification of the nucleobase group is independently selected from the group consisting of 2-thiouridine, 4-thiouridine, N⁶-methyladenosine, pseudouridine, 2,6-diaminopurine, inosine, thymidine, 5-methylcytosine, 5-substituted pyrimidine, isoguanine, isocytosine, and halogenated aromatic groups.

[0039] In certain embodiments, the crRNA portion comprises at least 50% modified nucleotides. In certain embodiments, the crRNA portion comprises at least 80% modified nucleotides. In certain embodiments, the crRNA portion comprises at least 90% modified nucleotides. In certain embodiments, the crRNA portion comprises 100% chemically modified nucleotides.

[0040] In certain embodiments, the chemically modified Nme gRNA comprises a crRNA portion modification pattern selected from the group consisting of:

| | |
|---|---|
| CR48-2 | (mN)#(mN)#(mN)#(mN)(mN)(rN)(rN)(rN)(rN)(rN)(rN)(rN)(rN)(rN)(rN)(rN)(rN) |
| | (rN)(rN)(rN)(rN)(rN)(rN)(rN)(rG)(rU)(rU)(rG)(rU)(rA)(rG)(rC)(rU)(rC)(rC) |
| | (rC)(rU)(mU)(mU)(mC)(mU)(mC)(mA)(mU)(mU)#(mU)#(mC)#(mG)(SEQ ID NO: 13); |
| CR48-154 | (mN)#(mN)#(mN)#(mN)(mN)(mN)(dN)#(mN)(mN)(mN)(mN)(fN)(mN)(fN)(mN)( |
| | fN)(mN)(mN)(rN)(rN)(rN)(mN)(rN)(rN)(mG)(rU)(rU)(rG)(mU)(mA)(mG)(mC)(r |
| | U)(rC)(rC)(rC)(rU)(mU)(mU)(mC)(mU)(mC)(mA)(mU)(mU)#(mU)#(mC)#(mG) |
| | (SEQ ID NO: 14); |
| CR48-155 | (mN)#(mN)#(mN)#(mN)(mN)(mN)(dN)#(mN)(mN)(mN)(mN)(mN)(mN)(fN)(mN) |
| | (fN)(mN)(mN)(rN)(rN)(rN)(mN)(rN)(rN)(mG)(rU)(rU)(rG)(mU)(mA)(mG)(mC)(r |
| | U)(rC)(rC)(rC)(rU)(mU)(mU)(mC)(mU)(mC)(mA)(mU)(mU)#(mU)#(mC)#(mG) |
| | (SEQ ID NO: 15); |
| CR48-190 | (mN)#(mN)#(mN)#(mN)(mN)(mN)(dN)#(mN)(mN)(mN)(mN)(fN)(mN)(fN)(mN)( |
| | fN)(mN)(mN)(rN)(fN)(mN)(mN)(mN)(mN)(mG)(rU)(rU)(rG)(mU)(mA)(mG)(mC) |
| | (rU)(rC)(rC)(rC)(rU)(mU)(mU)(mC)(mU)(mC)(mA)(mU)(mU)#(mU)#(mC)#(mG) |
| | (SEQ ID NO: 16); |
| CR48-191 | (mN)#(mN)#(mN)#(mN)(mN)(mN)(dN)#(mN)(mN)(mN)(mN)(fN)(mN)(fN)(mN)( |
| | fN)(mN)(mN)(rN)(mN)(fN)(mN)(mN)(mN)(mG)(rU)(rU)(rG)(mU)(mA)(mG)(mC) |
| | (rU)(rC)(rC)(rC)(rU)(mU)(mU)(mC)(mU)(mC)(mA)(mU)(mU)#(mU)#(mC)#(mG) |
| | (SEQ ID NO: 17); |
| CR48-192 | (mN)#(mN)#(mN)#(mN)(mN)(mN)(dN)#(mN)(mN)(mN)(mN)(mN)(mN)(fN)(mN) |
| | (fN)(mN)(mN)(rN)(fN)(mN)(mN)(mN)(mN)(mG)(rU)(rU)(rG)(mU)(mA)(mG)(mC |
| | )(rU)(rC)(rC)(rC)(rU)(mU)(mU)(mC)(mU)(mC)(mA)(mU)(mU)#(mU)#(mC)#(mG |
| | )(SEQ ID NO: 18); |
| CR48-193 | (mN)#(mN)#(mN)#(mN)(mN)(mN)(dN)#(mN)(mN)(mN)(mN)(mN)(mN)(fN)(mN) |
| | (fN)(mN)(mN)(rN)(mN)(fN)(mN)(mN)(mN)(mG)(rU)(rU)(rG)(mU)(mA)(mG)(mC |
| | )(rU)(rC)(rC)(rC)(rU)(mU)(mU)(mC)(mU)(mC)(mA)(mU)(mU)#(mU)#(mC)#(mG |
| | )(SEQ ID NO: 19); |
| CR48-194 | (mN)#(mN)#(mN)#(mN)(mN)(mN)(dN)#(mN)(mN)(mN)(mN)(fN)(mN)(fN)(mN)( |
| | IN)(mN)(mN)(rN)#(fN)(mN)(mN)(mN)(mN)(mG)(rU)(rU)(rG)(mU)(mA)(mG)(m |
| | C)(rU)(rC)(rC)(rC)(rU)(mU)(mU)(mC)(mU)(mC)(mA)(mU)(mU)#(mU)#(mC)#(m |
| | G)(SEQ ID NO: 20); |
| CR48-195 | (mN)#(mN)#(mN)#(mN)(mN)(mN)(dN)#(mN)(mN)(mN)(mN)(fN)(mN)(fN)(mN)( |
| | IN)(mN)(mN)(rN)#(mN)(IN)(mN)(mN)(mN)(mG)(rU)(rU)(rG)(mU)(mA)(mG)(m |
| | C)(rU)(rC)(rC)(rC)(rU)(mU)(mU)(mC)(mU)(mC)(mA)(mU)(mU)#(mU)#(mC)#(m |
| | G)(SEQ ID NO: 21); |
| CR48-196 | (mN)#(mN)#(mN)#(mN)(mN)(mN)(dN)#(mN)(mN)(mN)(mN)(mN)(mN)(fN)(mN) |
| | (fN)(mN)(mN)(rN)#(fN)(mN)(mN)(mN)(mN)(mG)(rU)(rU)(rG)(mU)(mA)(mG)(m |
| | C)(rU)(rC)(rC)(rC)(rU)(mU)(mU)(mC)(mU)(mC)(mA)(mU)(mU)#(mU)#(mC)#(m |
| | G)(SEQ ID NO: 22); |
| CR48-197 | (mN)#(mN)#(mN)#(mN)(mN)(mN)(dN)#(mN)(mN)(mN)(mN)(mN)(mN)(fN)(mN) |
| | (fN)(mN)(mN)(rN)#(mN)(fN)(mN)(mN)(mN)(mG)(rU)(rU)(rG)(mU)(mA)(mG)(m |
| | C)(rU)(rC)(rC)(rC)(rU)(mU)(mU)(mC)(mU)(mC)(mA)(mU)(mU)#(mU)#(mC)#(m |
| | G)(SEQ ID NO: 23); |
| CR48-198 | (mN)#(mN)#(mN)#(mN)(mN)(mN)(dN)#(mN)(mN)(mN)(mN)(fN)(mN)(fN)(mN)( |
| | fN)(mN)(mN)(mN)(fN)(mN)(mN)(mN)(mN)(mG)(rU)(rU)(rG)(mU)(mA)(mG)(m |
| | C)(rU)(rC)(rC)(rC)(rU)(mU)(mU)(mC)(mU)(mC)(mA)(mU)(mU)#(mU)#(mC)#(m |
| | G)(SEQ ID NO: 24); |
| CR48-199 | (mN)#(mN)#(mN)#(mN)(mN)(mN)(dN)#(mN)(mN)(mN)(mN)(fN)(mN)(fN)(mN)( |
| | fN)(mN)(mN)(mN)(mN)(fN)(mN)(mN)(mN)(mG)(rU)(rU)(rG)(mU)(mA)(mG)(m |
| | C)(rU)(rC)(rC)(rC)(rU)(mU)(mU)(mC)(mU)(mC)(mA)(mU)(mU)#(mU)#(mC)#(m |
| | G)(SEQ ID NO: 25); |
| CR48-200 | (mN)#(mN)#(mN)#(mN)(mN)(mN)(dN)#(mN)(mN)(mN)(mN)(mN)(mN)(fN)(mN) |
| | (fN)(mN)(mN)(mN)(fN)(mN)(mN)(mN)(mN)(mG)(rU)(rU)(rG)(mU)(mA)(mG)(m |
| | C)(rU)(rC)(rC)(rC)(rU)(mU)(mU)(mC)(mU)(mC)(mA)(mU)(mU)#(mU)#(mC)#(m |
| | G)(SEQ ID NO: 26); |
| CR48-201 | (mN)#(mN)#(mN)#(mN)(mN)(mN)(dN)#(mN)(mN)(mN)(mN)(mN)(mN)(fN)(mN) |
| | (fN)(mN)(mN)(mN)(mN)(fN)(mN)(mN)(mN)(mG)(rU)(rU)(rG)(mU)(mA)(mG)(m |
| | C)(rU)(rC)(rC)(rC)(rU)(mU)(mU)(mC)(mU)(mC)(mA)(mU)(mU)#(mU)#(mC)#(m |
| | G)(SEQ ID NO: 27); |
| CR48-202 | (mN)#(mN)#(mN)#(mN)(mN)(mN)(dN)#(mN)(mN)(mN)(mN)(fN)(mN)(fN)(mN)( |
| | fN)(mN)(mN)(fN)(fN)(mN)(mN)(mN)(mN)(mG)(rU)(rU)(rG)(mU)(mA)(mG)(mC) |
| | (rU)(rC)(rC)(rC)(rU)(mU)(mU)(mC)(mU)(mC)(mA)(mU)(mU)#(mU)#(mC)#(mG) |
| | (SEQ ID NO: 28); |
| CR48-203 | (mN)#(mN)#(mN)#(mN)(mN)(mN)(dN)#(mN)(mN)(mN)(mN)(fN)(mN)(fN)(mN)( |
| | fN)(mN)(mN)(fN)(mN)(fN)(mN)(mN)(mN)(mG)(rU)(rU)(rG)(mU)(mA)(mG)(mC) |
| | (rU)(rC)(rC)(rC)(rU)(mU)(mU)(mC)(mU)(mC)(mA)(mU)(mU)#(mU)#(mC)#(mG) |
| | (SEQ ID NO: 29); |
| CR48-204 | (mN)#(mN)#(mN)#(mN)(mN)(mN)(dN)#(mN)(mN)(mN)(mN)(mN)(mN)(fN)(mN) |
| | (fN)(mN)(mN)(fN)(fN)(mN)(mN)(mN)(mN)(mG)(rU)(rU)(rG)(mU)(mA)(mG)(mC |
| | )(rU)(rC)(rC)(rC)(rU)(mU)(mU)(mC)(mU)(mC)(mA)(mU)(mU)#(mU)#(mC)#(mG |
| | )(SEQ ID NO: 30); |
| CR48-205 | (mN)#(mN)#(mN)#(mN)(mN)(mN)(dN)#(mN)(mN)(mN)(mN)(mN)(mN)(fN)(mN) |
| | (fN)(mN)(mN)(fN)(mN)(fN)(mN)(mN)(mN)(mG)(rU)(rU)(rG)(mU)(mA)(mG)(mC |
| | )(rU)(rC)(rC)(rC)(rU)(mU)(mU)(mC)(mU)(mC)(mA)(mU)(mU)#(mU)#(mC)#(mG |
| | )(SEQ ID NO: 31); |
| CR48-213 | (mN)#(mN)#(mN)#(mN)(mN)(mN)(dN)#(mN)(mN)(mN)(mN)(mN)(mN)(fN)(mN) |
| | (IN)(mN)(mN)(rN)(rN)(rN)(mN)(rN)(rN)(mG)(dT)#(rU)(mG)(mU)(mA)(mG)(mC) |
| | (rU)(rC)(rC)(rC)(rU)(mU)(mU)(mC)(mU)(mC)(mA)(mU)(mU)#(mU)#(mC)#(mG) |
| | (SEQ ID NO: 32); |
| CR48-214 | (mN)#(mN)#(mN)#(mN)(mN)(mN)(dN)#(mN)(mN)(mN)(mN)(mN)(mN)(fN)(mN) |
| | (IN)(mN)(mN)(rN)(rN)(rN)(mN)(rN)(rN)(mG)(dT)#(rU)(mG)(mU)(mA)(mG)(mC) |
| | (rU)(rC)(mC)(rC)(rU)(mU)(mU)(mC)(mU)(mC)(mA)(mU)(mU)#(mU)#(mC)#(mG |
| | )(SEQ ID NO: 33); |
| CR48-215 | (mN)#(mN)#(mN)#(mN)(mN)(mN)(dN)#(mN)(mN)(mN)(mN)(mN)(mN)(fN)(mN) |
| | (IN)(mN)(mN)(rN)(rN)(rN)(mN)(rN)(rN)(mG)(dT)#(rU)(mG)(mU)(mA)(mG)(mC) |
| | (rU)(rC)(rC)(mC)(rU)(mU)(mU)(mC)(mU)(mC)(mA)(mU)(mU)#(mU)#(mC)#(mG |
| | )(SEQ ID NO: 34); |
| CR48-216 | (mN)#(mN)#(mN)#(mN)(mN)(mN)(dN)#(mN)(mN)(mN)(mN)(mN)(mN)(fN)(mN) |
| | (IN)(mN)(mN)(rN)(rN)(rN)(mN)(rN)(rN)(mG)(dT)#(rU)(mG)(mU)(mA)(mG)(mC) |
| | (rU)(rC)(mC)(mC)(rU)(mU)(mU)(mC)(mU)(mC)(mA)(mU)(mU)#(mU)#(mC)#(m |
| | G)(SEQ ID NO: 35); |
| CR48-217 | (mN)#(mN)#(mN)#(mN)(mN)(mN)(dN)#(mN)(mN)(mN)(mN)(mN)(mN)(fN)(mN) |
| | (fN)(mN)(mN)(rN)(rN)(rN)(mN)(rN)(rN)(mG)(rU)(rU)(rG)(mU)(mA)(mG)(mC)(d |
| | T)#(rC)(rC)(rC)(rU)(mU)(mU)(mC)(mU)(mC)(mA)(mU)(mU)#(mU)#(mC)#(mG) |
| | (SEQ ID NO: 36); |
| CR48-218 | (mN)#(mN)#(mN)#(mN)(mN)(mN)(dN)#(mN)(mN)(mN)(mN)(mN)(mN)(fN)(mN) |
| | (fN)(mN)(mN)(rN)(rN)(rN)(mN)(rN)(rN)(mG)(rU)(rU)(rG)(mU)(mA)(mG)(mC)(r |
| | U)(dC)#(rC)(rC)(rU)(mU)(mU)(mC)(mU)(mC)(mA)(mU)(mU)#(mU)#(mC)#(mG) |
| | (SEQ ID NO: 37); |
| CR48-219 | (mN)#(mN)#(mN)#(mN)(mN)(mN)(dN)#(mN)(mN)(mN)(mN)(mN)(mN)(fN)(mN) |
| | (fN)(mN)(mN)(rN)(rN)(rN)(mN)(rN)(rN)(mG)(rU)(rU)(rG)(mU)(mA)(mG)(mC)(r |
| | U)(rC)(dC)#(rC)(rU)(mU)(mU)(mC)(mU)(mC)(mA)(mU)(mU)#(mU)#(mC)#(mG) |
| | (SEQ ID NO: 38); |
| CR48-220 | (mN)#(mN)#(mN)#(mN)(mN)(mN)(dN)#(mN)(mN)(mN)(mN)(mN)(mN)(fN)(mN) |
| | (fN)(mN)(mN)(rN)(rN)(rN)(mN)(rN)(rN)(mG)(rU)(rU)(rG)(mU)(mA)(mG)(mC)(r |
| | U)(rC)(rC)(dC)#(rU)(mU)(mU)(mC)(mU)(mC)(mA)(mU)(mU)#(mU)#(mC)#(mG) |
| | (SEQ ID NO: 39); |
| CR48-221 | (mN)#(mN)#(mN)#(mN)(mN)(mN)(dN)#(mN)(mN)(mN)(mN)(mN)(mN)(fN)(mN) |
| | (fN)(mN)(mN)(rN)(rN)(rN)(mN)(rN)(rN)(mG)(rU)(rU)(rG)(mU)(mA)(mG)(mC)(r |
| | U)(rC)(rC)(rC)(dT)#(mU)(mU)(mC)(mU)(mC)(mA)(mU)(mU)#(mU)#(mC)#(mG) |
| | (SEQ ID NO: 40); |
| CR48-222 | (mN)#(mN)#(mN)#(mN)(mN)(mN)(dN)#(mN)(mN)(mN)(mN)(mN)(mN)(fN)(mN) |
| | (fN)(mN)(mN)(rN)(rN)(rN)(mN)(rN)(rN)(mG)(rU)(rU)(rG)(mU)(mA)(mG)(mC)(d |
| | T)#(rC)(dC)#(rC)(dT)#(mU)(mU)(mC)(mU)(mC)(mA)(mU)(mU)#(mU)#(mC)#(m |
| | G)(SEQ ID NO: 41); |
| CR48-223 | (mN)#(mN)#(mN)#(mN)(mN)(mN)(dN)#(mN)(mN)(mN)(mN)(mN)(mN)(fN)(mN) |
| | (fN)(mN)(mN)(rN)(rN)(rN)(mN)(rN)(rN)(mG)(dT)#(rU)(rG)(mU)(mA)(mG)(mC)( |
| | dT)#(dC)#(dC)#(rC)(dT)#(mU)(mU)(mC)(mU)(mC)(mA)(mU)(mU)#(mU)#(mC)# |
| | (mG)(SEQ ID NO: 42); |
| CR48-224 | (mN)#(mN)#(mN)#(mN)(mN)(mN)(dN)#(mN)(mN)(mN)(mN)(mN)(mN)(fN)(mN) |
| | (fN)(mN)(mN)(rN)(rN)(rN)(mN)(rN)(rN)(mG)(dT)#(rU)(mG)(mU)(mA)(mG)(mC) |
| | (dT)#(rC)(mC)(rC)(dT)#(mU)(mU)(mC)(mU)(mC)(mA)(mU)(mU)#(mU)#(mC)#( |
| | mG)(SEQ ID NO: 43); |
| CR48-225 | (mN)#(mN)#(mN)#(mN)(mN)(mN)(dN)#(mN)(mN)(mN)(mN)(mN)(mN)(IN)(mN) |
| | (IN)(mN)(mN)(rN)(rN)(rN)(mN)(rN)(rN)(mG)(dT)#(rU)(mG)(mU)(mA)(mG)(mC) |
| | (dT)#(rC)(dC)#(mC)(dT)#(mU)(mU)(mC)(mU)(mC)(mA)(mU)(mU)#(mU)#(mC)# |
| | (mG)(SEQ ID NO: 44); |
| CR48-226 | (mN)#(mN)#(mN)#(mN)(mN)(mN)(dN)#(mN)(mN)(mN)(mN)(mN)(mN)(fN)(mN) |
| | (IN)(mN)(mN)(rN)(rN)(rN)(mN)(rN)(rN)(mG)(dT)#(rU)(mG)(mU)(mA)(mG)(mC) |
| | (dT)#(rC)(mC)(mC)(dT)#(mU)(mU)(mC)(mU)(mC)(mA)(mU)(mU)#(mU)#(mC)#( |
| | mG)(SEQ ID NO: 45); |
| CR48-227 | (mN)#(mN)#(mN)#(mN)(mN)(mN)(dN)#(mN)(mN)(mN)(mN)(mN)(mN)(fN)(mN) |
| | (IN)(mN)(mN)(rN)(rN)(rN)(mN)(rN)(rN)(mG)(dT)#(rU)(mG)(mU)(mA)(mG)(mC) |
| | (dT)#(dC)#(mC)(mC)(dT)#(mU)(mU)(mC)(mU)(mC)(mA)(mU)(mU)#(mU)#(mC) |
| | #(mG)(SEQ ID NO: 46); |
| | (mN)#(mN)#(mN)#(mN)(mN)(mN)(dN)#(mN)(mN)(mN)(mN)(fN)(mN)(fN)(mN)( |
| CR48-199- | IN)(mN)(mN)(mN)(mN)(IN)(mN)(mN)(mN)(mG)(rU)(rU)(mG)(mU)(mA)(mG)(m |
| V1.1 | C)(rU)(rC)(rC)(dC)#(rU)(mU)(mU)(mC)(mU)(mC)(mA)(mU)(mU)#(mU)#(mC)#( |
| | mG)(SEQ ID NO: 47); |
| | (mN)#(mN)#(mN)#(mN)(mN)(mN)(dN)#(mN)(mN)(mN)(mN)(fN)(mN)(fN)(mN)( |
| CR48-199- | IN)(mN)(mN)(mN)(mN)(IN)(mN)(mN)(mN)(mG)(rU)(rU)(mG)(mU)(mA)(mG)(m |
| V1.2 | C)(rU)(rC)(dC)#(rC)(rU)(mU)(mU)(mC)(mU)(mC)(mA)(mU)(mU)#(mU)#(mC)#( |
| | mG)(SEQ ID NO: 48); |
| | (mN)#(mN)#(mN)#(mN)(mN)(mN)(dN)#(mN)(mN)(mN)(mN)(fN)(mN)(fN)(mN)( |
| CR48-199- | IN)(mN)(mN)(mN)(mN)(IN)(mN)(mN)(mN)(mG)(rU)(rU)(mG)(mU)(mA)(mG)(m |
| V1.3 | C)(rU)(rC)(rC)(rC)(dT)#(mU)(mU)(mC)(mU)(mC)(mA)(mU)(mU)#(mU)#(mC)#( |
| | mG)(SEQ ID NO: 49); |
| | (mN)#(mN)#(mN)#(mN)(mN)(mN)(dN)#(mN)(mN)(mN)(mN)(fN)(mN)(fN)(mN)( |
| CR48-199- | IN)(mN)(mN)(mN)(mN)(IN)(mN)(mN)(mN)(mG)(rU)(rU)(mG)(mU)(mA)(mG)(m |
| V1.4 | C)(rU)(rC)(mC)(rC)(rU)(mU)(mU)(mC)(mU)(mC)(mA)(mU)(mU)#(mU)#(mC)#( |
| | mG)(SEQ ID NO: 50); |
| | (mN)#(mN)#(mN)#(mN)(mN)(mN)(dN)#(mN)(mN)(mN)(mN)(fN)(mN)(fN)(mN)( |
| CR48-199- | IN)(mN)(mN)(mN)(mN)(IN)(mN)(mN)(mN)(mG)(rU)(rU)(mG)(mU)(mA)(mG)(m |
| V1.5 | C)(rU)(rC)(dC)#(dC)#(rU)(mU)(mU)(mC)(mU)(mC)(mA)(mU)(mU)#(mU)#(mC)# |
| | (mG)(SEQ ID NO: 51); |
| | (mN)#(mN)#(mN)#(mN)(mN)(mN)(dN)#(mN)(mN)(mN)(mN)(fN)(mN)(fN)(mN)( |
| CR48-199- | IN)(mN)(mN)(mN)(mN)(IN)(mN)(mN)(mN)(mG)(rU)(rU)(mG)(mU)(mA)(mG)(m |
| V1.6 | C)(rU)(rC)(dC)#(rC)(dT)#(mU)(mU)(mC)(mU)(mC)(mA)(mU)(mU)#(mU)#(mC)# |
| | (mG)(SEQ ID NO: 52); |
| | (mN)#(mN)#(mN)#(mN)(mN)(mN)(dN)#(mN)(mN)(mN)(mN)(fN)(mN)(fN)(mN)( |
| CR48-199- | IN)(mN)(mN)(mN)(mN)(IN)(mN)(mN)(mN)(mG)(rU)(rU)(mG)(mU)(mA)(mG)(m |
| V1.7 | C)(rU)(rC)(dC)#(dC)#(dT)#(mU)(mU)(mC)(mU)(mC)(mA)(mU)(mU)#(mU)#(mC |
| | )#(mG)(SEQ ID NO: 53); |
| | (mN)#(mN)#(mN)#(mN)(mN)(mN)(dN)#(mN)(mN)(mN)(mN)(fN)(mN)(fN)(mN)( |
| CR48-199- | IN)(mN)(mN)(mN)(mN)(IN)(mN)(mN)(mN)(mG)(rU)(rU)(mG)(mU)(mA)(mG)(m |
| V1.8 | C)(rU)(rC)(mC)(dC)#(rU)(mU)(mU)(mC)(mU)(mC)(mA)(mU)(mU)#(mU)#(mC)# |
| | (mG)(SEQ ID NO: 54); |
| | (mN)#(mN)#(mN)#(mN)(mN)(mN)(dN)#(mN)(mN)(mN)(mN)(fN)(mN)(fN)(mN)( |
| CR48-199- | IN)(mN)(mN)(mN)(mN)(IN)(mN)(mN)(mN)(mG)(rU)(rU)(mG)(mU)(mA)(mG)(m |
| V1.9 | C)(rU)(rC)(mC)(rC)(dT)#(mU)(mU)(mC)(mU)(mC)(mA)(mU)(mU)#(mU)#(mC)#( |
| | mG)(SEQ ID NO: 55); |
| | (mN)#(mN)#(mN)#(mN)(mN)(mN)(dN)#(mN)(mN)(mN)(mN)(fN)(mN)(fN)(mN)( |
| CR48-199- | fN)(mN)(mN)(mN)(mN)(fN)(mN)(mN)(mN)(mG)(rU)(rU)(mG)(mU)(mA)(mG)(m |
| Vl.10 | C)(rU)(rC)(mC)(dC)#(dT)#(mU)(mU)(mC)(mU)(mC)(mA)(mU)(mU)#(mU)#(mC) |
| | #(mG)(SEQ ID NO: 56); |
| | (mN)#(mN)#(mN)#(mN)(mN)(mN)(dN)#(mN)(mN)(mN)(mN)(fN)(mN)(fN)(mN)( |
| CR48-199- | fN)(mN)(mN)(mN)(mN)(fN)(mN)(mN)(mN)(mG)(rU)(rU)(mG)(mU)(mA)(mG)(m |
| V1.11 | C)(rU)(rC)(mC)(mC)(rU)(mU)(mU)(mC)(mU)(mC)(mA)(mU)(mU)#(mU)#(mC)#( |
| | mG)(SEQ ID NO: 57); |
| | (mN)#(mN)#(mN)#(mN)(mN)(mN)(dN)#(mN)(mN)(mN)(mN)(fN)(mN)(fN)(mN)( |
| CR48-199- | fN)(mN)(mN)(mN)(mN)(fN)(mN)(mN)(mN)(mG)(rU)(rU)(mG)(mU)(mA)(mG)(m |
| V1.12 | C)(rU)(rC)(mC)(mC)(dT)#(mU)(mU)(mC)(mU)(mC)(mA)(mU)(mU)#(mU)#(mC) |
| | #(mG)(SEQ ID NO: 58); |
| | (mN)#(mN)#(mN)#(mN)(mN)(mN)(dN)#(mN)(mN)(mN)(mN)(fN)(mN)(fN)(mN)( |
| CR48-199- | fN)(mN)(mN)(mN)(mN)(fN)(mN)(mN)(mN)(mG)(rU)(rU)(mG)(mU)(mA)(mG)(m |
| Vl.13 | C)(dT)#(rC)(rC)(dC)#(rU)(mU)(mU)(mC)(mU)(mC)(mA)(mU)(mU)#(mU)#(mC)# |
| | (mG)(SEQ ID NO: 59); |
| | (mN)#(mN)#(mN)#(mN)(mN)(mN)(dN)#(mN)(mN)(mN)(mN)(fN)(mN)(fN)(mN)( |
| CR48-199- | fN)(mN)(mN)(mN)(mN)(fN)(mN)(mN)(mN)(mG)(rU)(rU)(mG)(mU)(mA)(mG)(m |
| V1.14 | C)(dT)#(rC)(dC)#(rC)(rU)(mU)(mU)(mC)(mU)(mC)(mA)(mU)(mU)#(mU)#(mC)# |
| | (mG)(SEQ ID NO: 60); |
| | (mN)#(mN)#(mN)#(mN)(mN)(mN)(dN)#(mN)(mN)(mN)(mN)(fN)(mN)(fN)(mN)( |
| CR48-199- | fN)(mN)(mN)(mN)(mN)(fN)(mN)(mN)(mN)(mG)(rU)(rU)(mG)(mU)(mA)(mG)(m |
| V1.15 | C)(dT)#(rC)(rC)(rC)(dT)#(mU)(mU)(mC)(mU)(mC)(mA)(mU)(mU)#(mU)#(mC)# |
| | (mG)(SEQ ID NO: 61); |
| | (mN)#(mN)#(mN)#(mN)(mN)(mN)(dN)#(mN)(mN)(mN)(mN)(fN)(mN)(fN)(mN)( |
| CR48-199- | fN)(mN)(mN)(mN)(mN)(fN)(mN)(mN)(mN)(mG)(rU)(rU)(mG)(mU)(mA)(mG)(m |
| V1.16 | C)(dT)#(rC)(mC)(rC)(rU)(mU)(mU)(mC)(mU)(mC)(mA)(mU)(mU)#(mU)#(mC)#( |
| | mG)(SEQ ID NO: 62); |
| | (mN)#(mN)#(mN)#(mN)(mN)(mN)(dN)#(mN)(mN)(mN)(mN)(fN)(mN)(fN)(mN)( |
| CR48-199- | fN)(mN)(mN)(mN)(mN)(fN)(mN)(mN)(mN)(mG)(rU)(rU)(mG)(mU)(mA)(mG)(m |
| V1.17 | C)(dT)#(rC)(dC)#(dC)#(rU)(mU)(mU)(mC)(mU)(mC)(mA)(mU)(mU)#(mU)#(mC |
| | )#(mG)(SEQ ID NO: 63); |
| | (mN)#(mN)#(mN)#(mN)(mN)(mN)(dN)#(mN)(mN)(mN)(mN)(fN)(mN)(fN)(mN)( |
| CR48-199- | fN)(mN)(mN)(mN)(mN)(fN)(mN)(mN)(mN)(mG)(rU)(rU)(mG)(mU)(mA)(mG)(m |
| V1.18 | C)(dT)#(rC)(dC)#(rC)(dT)#(mU)(mU)(mC)(mU)(mC)(mA)(mU)(mU)#(mU)#(mC) |
| | #(mG)(SEQ ID NO: 64); |
| | (mN)#(mN)#(mN)#(mN)(mN)(mN)(dN)#(mN)(mN)(mN)(mN)(fN)(mN)(fN)(mN)( |
| CR48-199- | fN)(mN)(mN)(mN)(mN)(fN)(mN)(mN)(mN)(mG)(rU)(rU)(mG)(mU)(mA)(mG)(m |
| V1.19 | C)(dT)#(rC)(dC)#(dC)#(dT)#(mU)(mU)(mC)(mU)(mC)(mA)(mU)(mU)#(mU)#(m |
| | C)#(mG)(SEQ ID NO: 65); |
| | (mN)#(mN)#(mN)#(mN)(mN)(mN)(dN)#(mN)(mN)(mN)(mN)(fN)(mN)(fN)(mN)( |
| CR48-199- | fN)(mN)(mN)(mN)(mN)(fN)(mN)(mN)(mN)(mG)(rU)(rU)(mG)(mU)(mA)(mG)(m |
| V1.20 | C)(dT)#(rC)(mC)(dC)#(rU)(mU)(mU)(mC)(mU)(mC)(mA)(mU)(mU)#(mU)#(mC) |
| | #(mG)(SEQ ID NO: 66); |
| | (mN)#(mN)#(mN)#(mN)(mN)(mN)(dN)#(mN)(mN)(mN)(mN)(fN)(mN)(fN)(mN)( |
| CR48-199- | fN)(mN)(mN)(mN)(mN)(fN)(mN)(mN)(mN)(mG)(rU)(rU)(mG)(mU)(mA)(mG)(m |
| V1.21 | C)(dT)#(rC)(mC)(rC)(dT)#(mU)(mU)(mC)(mU)(mC)(mA)(mU)(mU)#(mU)#(mC) |
| | #(mG)(SEQ ID NO: 67); |
| | (mN)#(mN)#(mN)#(mN)(mN)(mN)(dN)#(mN)(mN)(mN)(mN)(fN)(mN)(fN)(mN)( |
| CR48-199- | fN)(mN)(mN)(mN)(mN)(fN)(mN)(mN)(mN)(mG)(rU)(rU)(mG)(mU)(mA)(mG)(m |
| V1.22 | C)(dT)#(rC)(mC)(dC)#(dT)#(mU)(mU)(mC)(mU)(mC)(mA)(mU)(mU)#(mU)#(m |
| | C)#(mG)(SEQ ID NO: 68); |
| | (mN)#(mN)#(mN)#(mN)(mN)(mN)(dN)#(mN)(mN)(mN)(mN)(fN)(mN)(fN)(mN)( |
| CR48-199- | fN)(mN)(mN)(mN)(mN)(fN)(mN)(mN)(mN)(mG)(rU)(rU)(mG)(mU)(mA)(mG)(m |
| V1.23 | C)(dT)#(rC)(mC)(mC)(rU)(mU)(mU)(mC)(mU)(mC)(mA)(mU)(mU)#(mU)#(mC) |
| | #(mG)(SEQ ID NO: 69); |
| | (mN)#(mN)#(mN)#(mN)(mN)(mN)(dN)#(mN)(mN)(mN)(mN)(fN)(mN)(fN)(mN)( |
| CR48-199- | fN)(mN)(mN)(mN)(mN)(fN)(mN)(mN)(mN)(mG)(rU)(rU)(mG)(mU)(mA)(mG)(m |
| V1.24 | C)(dT)#(rC)(mC)(mC)(dT)#(mU)(mU)(mC)(mU)(mC)(mA)(mU)(mU)#(mU)#(mC |
| | )#(mG)(SEQ ID NO: 70); |
| | (mN)#(mN)#(mN)#(mN)(mN)(mN)(dN)#(mN)(mN)(mN)(mN)(fN)(mN)(fN)(mN)( |
| CR48-199- | fN)(mN)(mN)(mN)(mN)(fN)(mN)(mN)(mN)(mG)(dT)#(rU)(mG)(mU)(mA)(mG)( |
| V1.25 | mC)(dT)#(rC)(rC)(dC)#(rU)(mU)(mU)(mC)(mU)(mC)(mA)(mU)(mU)#(mU)#(mC |
| | )#(mG)(SEQ ID NO: 71); |
| | (mN)#(mN)#(mN)#(mN)(mN)(mN)(dN)#(mN)(mN)(mN)(mN)(fN)(mN)(IN)(mN)( |
| CR48-199- | fN)(mN)(mN)(mN)(mN)(fN)(mN)(mN)(mN)(mG)(dT)#(rU)(mG)(mU)(mA)(mG)( |
| V1.26 | mC)(dT)#(rC)(dC)#(rC)(rU)(mU)(mU)(mC)(mU)(mC)(mA)(mU)(mU)#(mU)#(mC |
| | )#(mG)(SEQ ID NO: 72); |
| | (mN)#(mN)#(mN)#(mN)(mN)(mN)(dN)#(mN)(mN)(mN)(mN)(fN)(mN)(IN)(mN)( |
| CR48-199- | fN)(mN)(mN)(mN)(mN)(fN)(mN)(mN)(mN)(mG)(dT)#(rU)(mG)(mU)(mA)(mG)( |
| V1.27 | mC)(dT)#(rC)(rC)(rC)(dT)#(mU)(mU)(mC)(mU)(mC)(mA)(mU)(mU)#(mU)#(mC |
| | )#(mG)(SEQ ID NO: 73); |
| | (mN)#(mN)#(mN)#(mN)(mN)(mN)(dN)#(mN)(mN)(mN)(mN)(fN)(mN)(IN)(mN)( |
| CR48-199- | fN)(mN)(mN)(mN)(mN)(fN)(mN)(mN)(mN)(mG)(dT)#(rU)(mG)(mU)(mA)(mG)( |
| V1.28 | mC)(dT)#(rC)(mC)(rC)(rU)(mU)(mU)(mC)(mU)(mC)(mA)(mU)(mU)#(mU)#(mC) |
| | #(mG)(SEQ ID NO: 74); |
| | (mN)#(mN)#(mN)#(mN)(mN)(mN)(dN)#(mN)(mN)(mN)(mN)(fN)(mN)(IN)(mN)( |
| CR48-199- | fN)(mN)(mN)(mN)(mN)(fN)(mN)(mN)(mN)(mG)(dT)#(rU)(mG)(mU)(mA)(mG)( |
| V1.29 | mC)(dT)#(rC)(dC)#(dC)#(rU)(mU)(mU)(mC)(mU)(mC)(mA)(mU)(mU)#(mU)#(m |
| | C)#(mG)(SEQ ID NO: 75); |
| | (mN)#(mN)#(mN)#(mN)(mN)(mN)(dN)#(mN)(mN)(mN)(mN)(fN)(mN)(IN)(mN)( |
| CR48-199- | fN)(mN)(mN)(mN)(mN)(fN)(mN)(mN)(mN)(mG)(dT)#(rU)(mG)(mU)(mA)(mG)( |
| V1.30 | mC)(dT)#(rC)(dC)#(rC)(dT)#(mU)(mU)(mC)(mU)(mC)(mA)(mU)(mU)#(mU)#(m |
| | C)#(mG)(SEQ ID NO: 76); |
| | (mN)#(mN)#(mN)#(mN)(mN)(mN)(dN)#(mN)(mN)(mN)(mN)(fN)(mN)(IN)(mN)( |
| CR48-199- | fN)(mN)(mN)(mN)(mN)(fN)(mN)(mN)(mN)(mG)(dT)#(rU)(mG)(mU)(mA)(mG)( |
| V1.31 | mC)(dT)#(rC)(dC)#(dC)#(dT)#(mU)(mU)(mC)(mU)(mC)(mA)(mU)(mU)#(mU)#( |
| | mC)#(mG)(SEQ ID NO: 77); |
| | (mN)#(mN)#(mN)#(mN)(mN)(mN)(dN)#(mN)(mN)(mN)(mN)(fN)(mN)(IN)(mN)( |
| CR48-199- | fN)(mN)(mN)(mN)(mN)(fN)(mN)(mN)(mN)(mG)(dT)#(rU)(mG)(mU)(mA)(mG)( |
| V1.32 | mC)(dT)#(rC)(mC)(dC)#(rU)(mU)(mU)(mC)(mU)(mC)(mA)(mU)(mU)#(mU)#(m |
| | C)#(mG)(SEQ ID NO: 78); |
| | (mN)#(mN)#(mN)#(mN)(mN)(mN)(dN)#(mN)(mN)(mN)(mN)(fN)(mN)(IN)(mN)( |
| CR48-199- | fN)(mN)(mN)(mN)(mN)(fN)(mN)(mN)(mN)(mG)(dT)#(rU)(mG)(mU)(mA)(mG)( |
| V1.33 | mC)(dT)#(rC)(mC)(rC)(dT)#(mU)(mU)(mC)(mU)(mC)(mA)(mU)(mU)#(mU)#(m |
| | C)#(mG)(SEQ ID NO: 79); |
| | (mN)#(mN)#(mN)#(mN)(mN)(mN)(dN)#(mN)(mN)(mN)(mN)(fN)(mN)(IN)(mN)( |
| CR48-199- | fN)(mN)(mN)(mN)(mN)(fN)(mN)(mN)(mN)(mG)(dT)#(rU)(mG)(mU)(mA)(mG)( |
| V1.34 | mC)(dT)#(rC)(mC)(dC)#(dT)#(mU)(mU)(mC)(mU)(mC)(mA)(mU)(mU)#(mU)#( |
| | mC)#(mG)(SEQ ID NO: 80); |
| | (mN)#(mN)#(mN)#(mN)(mN)(mN)(dN)#(mN)(mN)(mN)(mN)(fN)(mN)(IN)(mN)( |
| CR48-199- | fN)(mN)(mN)(mN)(mN)(fN)(mN)(mN)(mN)(mG)(dT)#(rU)(mG)(mU)(mA)(mG)( |
| V1.35 | mC)(dT)#(rC)(mC)(mC)(rU)(mU)(mU)(mC)(mU)(mC)(mA)(mU)(mU)#(mU)#(m |
| | C)#(mG)(SEQ ID NO: 81); |
| | (mN)#(mN)#(mN)#(mN)(mN)(mN)(dN)#(mN)(mN)(mN)(mN)(fN)(mN)(fN)(mN)( |
| CR48-199- | fN)(mN)(mN)(mN)(mN)(fN)(mN)(mN)(mN)(mG)(dT)#(rU)(mG)(mU)(mA)(mG)( |
| V1.36 | mC)(dT)#(rC)(mC)(mC)(dT)#(mU)(mU)(mC)(mU)(mC)(mA)(mU)(mU)#(mU)#(m |
| | C)#(mG)(SEQ ID NO: 82); |
| | (mN)#(mN)#(mN)#(mN)(mN)(mN)(dN)#(mN)(mN)(mN)(mN)(fN)(mN)(fN)(mN)( |
| CR48-203- | fN)(mN)(mN)(fN)(mN)(fN)(mN)(mN)(mN)(mG)(rU)(rU)(mG)(mU)(mA)(mG)(m |
| V1.7 | C)(rU)(rC)(dC)#(dC)#(dT)#(mU)(mU)(mC)(mU)(mC)(mA)(mU)(mU)#(mU)#(mC |
| | )#(mG)(SEQ ID NO: 83); |
| | (mN)#(mN)#(mN)#(mN)(mN)(mN)(dN)#(mN)(mN)(mN)(mN)(fN)(mN)(fN)(mN)( |
| CR48-203- | fN)(mN)(mN)(N)(mN)(fN)(mN)(mN)(mN)(mG)(rU)(rU)(mG)(mU)(mA)(mG)(m |
| Vl.10 | C)(rU)(rC)(mC)(dC)#(dT)#(mU)(mU)(mC)(mU)(mC)(mA)(mU)(mU)#(mU)#(mC) |
| | #(mG)(SEQ ID NO: 84); |
| | (mN)#(mN)#(mN)#(mN)(mN)(mN)(dN)#(mN)(mN)(mN)(mN)(fN)(mN)(fN)(mN)( |
| CR48-203- | fN)(mN)(mN)(fN)(mN)(fN)(mN)(mN)(mN)(mG)(rU)(rU)(mG)(mU)(mA)(mG)(m |
| V1.12 | C)(rU)(rC)(mC)(mC)(dT)#(mU)(mU)(mC)(mU)(mC)(mA)(mU)(mU)#(mU)#(mC) |
| | #(mG)(SEQ ID NO: 85); |
| | (mN)#(mN)#(mN)#(mN)(mN)(mN)(dN)#(mN)(mN)(mN)(mN)(fN)(mN)(IN)(mN)( |
| CR48-203- | fN)(mN)(mN)(IN)(mN)(fN)(mN)(mN)(mN)(mG)(rU)(rU)(mG)(mU)(mA)(mG)(m |
| V1.18 | C)(dT)#(rC)(dC)#(rC)(dT)#(mU)(mU)(mC)(mU)(mC)(mA)(mU)(mU)#(mU)#(mC) |
| | #(mG)(SEQ ID NO: 86); |
| | (mN)#(mN)#(mN)#(mN)(mN)(mN)(dN)#(mN)(mN)(mN)(mN)(fN)(mN)(IN)(mN)( |
| CR48-203- | fN)(mN)(mN)(IN)(mN)(fN)(mN)(mN)(mN)(mG)(rU)(rU)(mG)(mU)(mA)(mG)(m |
| V1.19 | C)(dT)#(rC)(dC)#(dC)#(dT)#(mU)(mU)(mC)(mU)(mC)(mA)(mU)(mU)#(mU)#(m |
| | C)#(mG)(SEQ ID NO: 87); |
| | (mN)#(mN)#(mN)#(mN)(mN)(mN)(dN)#(mN)(mN)(mN)(mN)(fN)(mN)(IN)(mN)( |
| CR48-203- | fN)(mN)(mN)(IN)(mN)(fN)(mN)(mN)(mN)(mG)(rU)(rU)(mG)(mU)(mA)(mG)(m |
| V1.22 | C)(dT)#(rC)(mC)(dC)#(dT)#(mU)(mU)(mC)(mU)(mC)(mA)(mU)(mU)#(mU)#(m |
| | C)#(mG)(SEQ ID NO: 88); |
| | (mN)#(mN)#(mN)#(mN)(mN)(mN)(dN)#(mN)(mN)(mN)(mN)(fN)(mN)(IN)(mN)( |
| CR48-203- | fN)(mN)(mN)(IN)(mN)(fN)(mN)(mN)(mN)(mG)(rU)(rU)(mG)(mU)(mA)(mG)(m |
| V1.24 | C)(dT)#(rC)(mC)(mC)(dT)#(mU)(mU)(mC)(mU)(mC)(mA)(mU)(mU)#(mU)#(mC |
| | )#(mG)(SEQ ID NO: 89); |
| | (mN)#(mN)#(mN)#(mN)(mN)(mN)(dN)#(mN)(mN)(mN)(mN)(fN)(mN)(IN)(mN)( |
| CR48-203- | fN)(mN)(mN)(IN)(mN)(fN)(mN)(mN)(mN)(mG)(dT)#(rU)(mG)(mU)(mA)(mG)(m |
| V1.30 | C)(dT)#(rC)(dC)#(rC)(dT)#(mU)(mU)(mC)(mU)(mC)(mA)(mU)(mU)#(mU)#(mC) |
| | #(mG)(SEQ ID NO: 90); |
| | (mN)#(mN)#(mN)#(mN)(mN)(mN)(dN)#(mN)(mN)(mN)(mN)(fN)(mN)(IN)(mN)( |
| CR48-203- | fN)(mN)(mN)(IN)(mN)(fN)(mN)(mN)(mN)(mG)(dT)#(rU)(mG)(mU)(mA)(mG)(m |
| V1.31 | C)(dT)#(rC)(dC)#(dC)#(dT)#(mU)(mU)(mC)(mU)(mC)(mA)(mU)(mU)#(mU)#(m |
| | C)#(mG)(SEQ ID NO: 91); |
| | (mN)#(mN)#(mN)#(mN)(mN)(mN)(dN)#(mN)(mN)(mN)(mN)(fN)(mN)(IN)(mN)( |
| CR48-203- | fN)(mN)(mN)(IN)(mN)(fN)(mN)(mN)(mN)(mG)(dT)#(rU)(mG)(mU)(mA)(mG)(m |
| V1.34 | C)(dT)#(rC)(mC)(dC)#(dT)#(mU)(mU)(mC)(mU)(mC)(mA)(mU)(mU)#(mU)#(m |
| | C)#(mG)(SEQ ID NO: 92); or |
| | (mN)#(mN)#(mN)#(mN)(mN)(mN)(dN)#(mN)(mN)(mN)(mN)(fN)(mN)(fN)(mN)( |
| CR48-203- | fN)(mN)(mN)(fN)(mN)(fN)(mN)(mN)(mN)(mG)(dT)#(rU)(mG)(mU)(mA)(mG)(m |
| V1.36 | C)(dT)#(rC)(mC)(mC)(dT)#(mU)(mU)(mC)(mU)(mC)(mA)(mU)(mU)#(mU)#(mC |
| | )#(mG)(SEQ ID NO: 93), |

[0041] wherein rN=RNA, mN=2′-O-methyl RNA, fN=2′-fluoro RNA, N #N=phosphorothioate linkage, and N=any nucleotide.

[0042] In certain embodiments, the chemically modified Nme gRNA further comprises a nucleotide or non-nucleotide loop or linker linking the 3′ end of the crRNA portion to the 5′ end of the tracrRNA portion.

[0043] In certain embodiments, the nucleotide loop is chemically modified. In certain embodiments, the nucleotide loop comprises the nucleotide sequence of GAAA. In certain embodiments, the nucleotide loop comprises the nucleotide sequence of (mG)(mA)(mA)(mA), wherein mN corresponds to a 2′-O-methyl RNA and N corresponds to any nucleotide. In certain embodiments, the non-nucleotide linker comprises an azide linker, an ethylene glycol oligomer, a tetrazine linker, an alkyl chain, a peptide, an amide, or a carbamate.

[0044] In one aspect, the disclosure provides a chemically modified Neisseria meningitidis (Nme) single guide RNA (sgRNA) comprising one or more chemical modifications.

[0045] In certain embodiments, the sgRNA is between 99 and 145 nucleotides in length. In certain embodiments, the sgRNA is 145 nucleotides in length, 121 nucleotides in length, 111 nucleotides in length, 107 nucleotides in length, 105 nucleotides in length, 103 nucleotides in length, 102 nucleotides in length, 101 nucleotides in length, 100 nucleotides in length, or 99 nucleotides in length.

[0046] In certain embodiments, the one or more chemical modifications are each independently selected from a modification of a ribose group, a phosphate group, a nucleobase, or a combination thereof.

[0047] In certain embodiments, each modification of the ribose group is independently selected from the group consisting of 2′-O-methyl, 2′-fluoro, 2′-deoxy, 2′-O-(2-methoxyethyl) (MOE), 2′-NH₂ (2′-amino), 4′-thio, a bicyclic nucleotide, a locked nucleic acid (LNA), a 2′-(S)-constrained ethyl (S-cEt), a constrained MOE, and a 2′-O,4′-C-aminomethylene bridged nucleic acid (2′,4′-BNA^{NC}).

[0048] In certain embodiments, at least 40% of the ribose groups are chemically modified. In certain embodiments, at least 80% of the ribose groups are chemically modified. In certain embodiments, 100% of the ribose groups are chemically modified.

[0049] In certain embodiments, each modification of the phosphate group is independently selected from the group consisting of a phosphorothioate, phosphonoacetate (PACE), thiophosphonoacetate (thioPACE), amide, triazole, phosphonate, or phosphotriester modification.

[0050] In certain embodiments, each modification of the nucleobase group is independently selected from the group consisting of 2-thiouridine, 4-thiouridine, N⁶-methyladenosine, pseudouridine, 2,6-diaminopurine, inosine, thymidine, 5-methylcytosine, 5-substituted pyrimidine, isoguanine, isocytosine, and halogenated aromatic groups.

[0051] In certain embodiments, the chemically modified Nme sgRNA comprises at least 40% modified nucleotides. In certain embodiments, the chemically modified Nme sgRNA comprises at least 80% modified nucleotides. In certain embodiments, the chemically modified Nme sgRNA comprises at least 90% modified nucleotides. In certain embodiments, the chemically modified Nme sgRNA comprises 100% modified nucleotides.

[0052] In certain embodiments, the chemically modified Nme sgRNA comprises between 2 and 100 modified nucleotides.

[0053] In certain embodiments, the chemically modified Nme sgRNA comprises at least one chemical modification in the nucleotide sequence of any one of:

(SEQ ID NO: 97)
(N)ₓGUUGUAGCUCCCUUUCUCAUUUCGGAAACGA
AAUGAGAACCGUUGCUACAAUAAGGCCGUCUGAAA
AGAUGUGCCGCAACGCUCUGCCCCUUAAAGCUUCU
GCUUUAAGGGGCAUCGUUUA
(SG-145NT);
(SEQ ID NO: 98)
(N)ₓGUUGUAGCUCCCGAAACGUUGCUACAAUAAG
GCCGUCUGAAAAGAUGUGCCGCAACGCUCUGCCCC
UUAAAGCUUCUGCUUUAAGGGGCAUCGUU
(SG-121NTv1);
(SEQ ID NO: 99)
(N)ₓGUUGUAGCUCCCGAAACGUUGCUACAAUAAG
GCCGUCUGAAAAGAUGUGCCGCAACGCUCUGCCCC
UUAAAGCUUCUGCUUUAAGGGGCAUCGUU
UA
(SG-121NTv2);
(SEQ ID NO: 100)
(N)ₓGUUGUAGCUCCCGAAACGUUGCUACAAUAAG
GCCGUCUGAAAAGAUGUGCCGCAACGCUCUGCCCC
UUUUCUAAGGGGCAUCGUUUA
(SG-111NT);
(SEQ ID NO: 101)
(N)ₓGUUGUAGCUCCCGAAACGUUGCUACAAUAAG
GCCGUCUGAAAAGAUGUGCCGCAACGCUCUGCCCC
UUUCUAGGGGCAUCGUU
(SG-107NT);
(SEQ ID NO: 102)
(N)ₓGUUGUAGCUCCCGAAACGUUGCUACAAUAAG
GCCGUCUGAAAAGAUGUGCCGCAACGCUCUGCCCC
UUCUGGGGCAUCGUU
(SG-105NTv1);
(SEQ ID NO: 103)
(N)ₓGUUGUAGCUCCCGAAACGUUGCUACAAUAAG
GCCGUCUGAAAAGAUGUGCCGCAACGCUCUGCCCC
UUUUCUAAGGGGCAU
(SG-105NTv2);
(SEQ ID NO: 104)
(N)ₓGUUGUAGCUCCCGAAACGUUGCUACAAUAAG
GCCGUCUGAAAAGAUGUGCCGCAACGCUCUGCCUU
CUGGCAUCGUUUA
(SG-103NTv1);
(SEQ ID NO: 105)
(N)ₓGUUGUAGCUCCCGAAACGUUGCUACAAUAAG
GCCGUCUGAAAAGAUGUGCCGCAACGCUCUGCCCU
UCUGGGCAUCGUU
(SG-103NTv2);
(SEQ ID NO: 106)
(N)ₓGUUGUAGCUCCCGAAACGUUGCUACAAUAAG
GCCGUCUGAAAAGAUGUGCCGCAACGCUCUGCUUC
UGCAUCGUUUA
(SG-101NTv1);
or
(SEQ ID NO: 107)
(N)ₓGUUGUAGCUCCCGAAACGUUGCUACAAUAAG
GCCGUCUGAAAAGAUGUGCCGCAACGCUCUGCUUC
UGCAUCGUU
(SG-99NT),

wherein N corresponds to any nucleotide and x corresponds to any integer between 18 and 26.

[0054] In one aspect, the disclosure provides a chemically modified Neisseria meningitidis (Nme) single guide RNA (sgRNA) comprising a chemical modification pattern selected from anyone of:

(SEQ ID NO: 108)
(mN)#(mN)#(mN)#(rN)(rN)(rN)(rN)(rN)(rN)
(rN)(rN)(rN)(rN)(rN)(rN)(rN)(rN)(rN)(rN
)(rN)(rN)(rN)(rN)(rN)(rG)(rU)(rU)(rG)(r
U)(rA)(rG)(rC)(rU)(rC)(rC)(rC)(mG)(mA)(
mA)(mA)(rC)(rG)(rU)(rU)(rG)(rC)(rU)(rA)
(rC)(rA)(rA)(rU)(rA)(rA)(rG)(rG)(rC)(rC
)(rG)(rU)(mC)(mU)(mG)(mA)(mA)(mA)(mA)(m
G)(rA)(rU)(rG)(rU)(rG)(rC)(rC)(rG)(rC)(
rA)(rA)(rC)(rG)(rC)(rU)(rC)(rU)(rG)(rC)
(rC)(mU)(mU)(mC)(mU)(rG)(rG)(rC)(rA)(rU
)(rC)(rG)(rU)#(mU)#(mU)#(mA)
(SG-1);
(SEQ ID NO: 109)
(mN)#(mN)#(mN)#(rN)(rN)(rN)(rN)(rN)(rN)
(rN)(rN)(rN)(rN)(rN)(rN)(rN)(rN)(rN)(rN
)(rN)(rN)(rN)(rN)(rN)(rG)(rU)(rU)(rG)(r
U)(mA)(mG)(mC)(rU)(rC)(rC)(rC)(mG)(mA)(
mA)(mA)(rC)(rG)(rU)(rU)(rG)(rC)(rU)(rA)
(rC)(rA)(rA)(rU)(rA)(rA)(rG)(rG)(mC)(mC
)(rG)(mU)(mC)(mU)(mG)(mA)(mA)(mA)(mA)(m
G)(rA)(rU)(rG)(rU)(rG)(rC)(rC)(rG)(rC)(
rA)(rA)(rC)(rG)(rC)(mU)(mC)(mU)(mG)(rC)
(rC)(mU)(mU)(mC)(mU)(rG)(rG)(rC)(rA)(rU
)(mC)(mG)(mU)#(mU)#(mU)#(mA)
(SG-2);
(SEQ ID NO: 110)
(mN)#(mN)#(mN)#(mN)(mN)(rN)(rN)(rN)(mN)
(mN)(mN)(rN)(mN)(rN)(rN)(rN)(rN)(mN)(rN
)(rN)(rN)(mN)(rN)(rN)(mG)(rU)(rU)(rG)(m
U)(mA)(mG)(mC)(rU)(rC)(rC)(rC)(mG)(mA)(
mA)(mA)(mC)(rG)(mU)(rU)(mG)(mC)(rU)(mA)
(mC)(rA)(rA)(rU)(rA)(mA)(rG)(mG)(mC)(mC
)(mG)(mU)(mC)(mU)(mG)(mA)(mA)(mA)(mA)(m
G)(mA)(mU)(rG)(mU)(mG)(mC)(mC)(mG)(mC)(
mA)(mA)(mC)(mG)(mC)(mU)(mC)(mU)(mG)(mC)
(mC)(mU)(mU)(mC)(mU)(rG)(mG)(rC)(mA)(mU
)(mC)(mG)(mU)#(mU)#(mU)#(mA)
(SG-3);
(SEQ ID NO: 111)
(mN)#(mN)#(mN)#(mN)(mN)(rN)(rN)(rN)(mN)
(mN)(mN)(rN)(mN)(rN)(rN)(mN)(rN)(mN)(rN
)(rN)(rN)(mN)(rN)(rN)(mG)(rU)(rU)(rG)(m
U)(mA)(mG)(mC)(rU)(rC)(rC)(rC)(mG)(mA)(
mA)(mA)(mC)(rG)(mU)(rU)(mG)(mC)(rU)(mA)
(mC)(rA)(rA)(rU)(rA)(mA)(rG)(mG)(fC)(mC
)(fG)(mU)(fC)(mU)(fG)(mA)(fA)(mA)(fA)(m
G)(fA)(mU)(rG)(mU)(fG)(mC)(fC)(mG)(fC)(
mA)(fA)(mC)(fG)(mC)(fU)(mC)(fU)(mG)(fC)
(mC)(fU)(mU)(fC)(mU)(rG)(mG)(rC)(mA)(fU
)(mC)(fG)(mU)#(mU)#(mU)#(mA)
(SG-4);
(SEQ ID NO: 112)
(mN)#(mN)#(mN)#(mN)(mN)(rN)(rN)(rN)(mN)
(mN)(mN)(rN)(mN)(rN)(rN)(rN)(rN)(mN)(rN
)(rN)(rN)(mN)(rN)(rN)(mG)(rU)(rU)(rG)(m
U)(mA)(mG)(mC)(rU)(rC)(rC)(rC)(mG)(mA)(
mA)(mA)(rC)(rG)(rU)(rU)(rG(rC)(rU)(rA)(
rC)(rA)(rA)(rU)(rA)(rA)(rG)(rG)(mC)(mC)
(rG)(mU)(mC(mU)(mG)(mA)(mA)(mA)(mA)(mG)
(rA)(rU)(rG)(rU)(rG)(rC)(rC)(rG)(rC)(rA
(rA)(rC)(rG)(rC)(mU)(mC)(mU)(mG)(rC)(rC
)(mU)(mU)(mC)(mU)(rG)(rG)(rC)(rA)(rU)(m
C)(mG)(mU)#(mU)#(mU)#(mA)
(SG-5);
(SEQ ID NO: 113)
(mN)#(mN)#(mN)#(rN)(mN)(rN)(rN)(rN)(mN)
(mN)(rN)(rN)(mN)(rN)(rN)(rN)(rN)(mN)(rN
)(rN)(rN)(mN)(rN)(rN)(mG)(rU)(rU)(rG)(r
U)(mA)(mG)(mC)(rU)(rC)(rC)(rC)(mG)(mA)(
mA)(mA)(rC)(rG)(rU)(rU)(rG)(rC)(rU)(rA)
(rC)(rA)(rA)(rU)(rA)(rA)(rG)(rG)(mC)(mC
)(rG)(mU)(mC)(mU)(mG)(mA)(mA)(mA)(mA)(m
G)(rA)(rU)(rG)(rU)(rG)(rC)(rC)(rG)(rC)(
rA)(rA)(rC)(rG)(rC)(mU)(mC)(mU)(mG)(rC)
(rC)(mU)(mU)(mC)(mU)(rG)(rG)(rC)(rA)(rU
)(mC)(mG)(mU)#(mU)#(mU)#(mA)
(SG-6);
(SEQ ID NO: 114)
(mN)#(mN)#(mN)#(rN)(rN)(rN)(rN)(rN)(rN)
(rN)(rN)(rN)(rN)(rN)(rN)(rN)(rN)(mN)(rN
)(rN)(rN)(mN)(rN)(rN)(rG)(rU)(rU)(rG)(r
U)(mA)(mG)(mC)(rU)(rC)(rC)(rC)(mG)(mA)(
mA)(mA)(rC)(rG)(rU)(rU)(rG)(rC)(rU)(rA)
(rC)(rA)(rA)(rU)(rA)(rA)(rG)(rG)(mC)(mC
)(rG)(mU)(mC)(mU)(mG)(mA)(mA)(mA)(mA)(m
G)(rA)(rU)(rG)(rU)(rG)(rC)(rC)(rG)(rC)(
rA)(rA)(rC)(rG)(rC)(mU)(mC)(mU)(mG)(rC)
(rC)(mU)(mU)(mC)(mU)(rG)(rG)(rC)(rA)(rU
)(mC)(mG)(mU)#(mU)#(mU)#(mA)
(SG-7);
(SEQ ID NO: 115)
(mN)#(mN)#(mN)#(mN)(mN)(mN)(mN)(mN)(mN)
(mN)(mN)(mN)(mN)(mN)(rN)(rN)(rN)(rN)(rN)
(rN)(rN)(rN)(rN)(rN)(rG)(rU)(rU)(rG)(rU
)(mA)(mG)(mC)(rU)(rC)(rC)(rC)(mG)(mA)(m
A)(mA)(rC)(rG)(rU)(rU)(rG)(rC)(rU)(rA)(
rC)(rA(rA)(rU)(rA)(rA)(rG)(rG)(mC)(mC)(
rG)(mU)(mC)(mU)(mG)(mA)(mA)(mA)(mA)(mG)
(rA)(rU)(rG)(rU)(rG)(rC)(rC)(rG)(rC)(rA
)(rA)(rC)(rG)(rC)(mU)(mC)(mU)(mG)(rC)(r
C)(mU)(mU)(mC)(mU)(rG)(rG)(rC)(rA)(rU)(
mC)(mG)(mU)#(mU)#(mU)#(mA)
(SG-8);
(SEQ ID NO: 116)
(mN)#(mN)#(mN)#(mN)(mN)(mN)(mN)(mN)(mN)
(mN)(mN)(mN)(mN)(mN)(rN)(rN)(rN)(mN)(rN
)(rN)(rN)(mN)(rN)(rN)(mG)(rU)(rU)(rG)(m
U)(mA)(mG)(mC)(rU)(rC)(rC)(rC)(mG)(mA)(
mA)(mA)(rC)(rG)(rU)(rU)(rG)(rC)(rU)(rA)
(rC)(rA)(rA)(rU)(rA)(rA)(rG)(rG)(mC)(mC
)(rG)(mU)(mC)(mU)(mG)(mA)(mA)(mA)(mA)(m
G)(rA)(rU)(rG)(rU)(rG)(rC)(rC)(rG)(rC)(
rA)(rA)(rC)(rG)(rC)(mU)(mC)(mU)(mG)(rC)
(rC)(mU)(mU)(mC)(mU)(rG)(rG)(rC)(rA)(rU
)(mC)(mG)(mU)#(mU)#(mU)#(mA)
(SG-9);
(SEQ ID NO: 117)
(mN)#(mN)#(mN)#(mN)(mN)(rN)(rN)(rN)(mN)
(mN)(mN)(rN)(mN)(rN)(rN)(rN)(rN)(mN)(rN
)(rN)(rN)(mN)(rN)(rN)(mG)(rU)(rU)(rG)(m
U)(mA)(mG)(mC)(rU)(rC)(rC)(rC)(mG)(mA)(
mA)(mA)(rC)(rG)(rU)(rU)(rG)(rC)(rU)(rA)
(rC)(rA)(rA)(rU)(rA)(mA)(rG)(mG)(mC)(mC
)(mG)(mU)(mC)(mU)(mG)(mA)(mA)(mA)(mA)(m
G)(mA)(mU)(rG)(rU)(mG)(mC)(mC)(rG)(rC)(
rA)(rA)(rC)(rG)(rC)(mU)(mC)(mU)(mG)(rC)
(rC)(mU)(mU)(mC)(mU)(rG)(rG)(rC)(rA)(rU
)(mC)(mG)(mU)#(mU)#(mU)#(mA)
(SG-10);
(SEQ ID NO: 118)
(mN)#(mN)#(mN)#(mN)(mN)(rN)(rN)(rN)(mN)
(mN)(mN)(rN)(mN)(rN)(rN)(rN)(rN)(mN)(rN
)(rN)(rN)(mN)(rN)(rN)(mG)(rU)(rU)(rG)(m
U)(mA)(mG)(mC)(rU)(rC)(rC)(rC)(mG)(mA)(
mA)(mA)(rC)(rG)(rU)(rU)(rG)(rC)(rU)(rA)
(rC)(rA)(rA)(rU)(rA)(rA)(rG)(rG)(mC)(mC
)(rG)(mU)(mC)(mU)(mG)(mA)(mA)(mA)(mA)(m
G)(rA)(rU)(rG)(rU)(rG)(rC)(rC)(mG)(rC)(
mA)(mA)(mC)(mG)(mC)(mU)(mC)(mU)(mG)(mC)
(mC)(mU)(mU)(mC)(mU)(rG)(mG)(rC)(mA)(rU
)(mC)(mG)(mU)#(mU)#(mU)#(mA)
(SG-11);
(SEQ ID NO: 119)
(mN)#(mN)#(mN)#(mN)(mN)(rN)(rN)(rN)(mN)
(mN)(mN)(rN)(mN)(rN)(rN)(rN)(rN)(mN)(rN
)(rN)(rN)(mN)(rN)(rN)(fG)(rU)(rU)(rG)(f
U)(fA)(fG)(fC)(rU)(rC)(rC)(rC)(mG)(mA)(
mA)(mA)(rC)(rG)(rU)(rU)(rG)(rC)(rU)(rA)
(rC)(rA)(rA)(rU)(rA)(rA)(rG)(rG)(fC)(fC
)(rG)(fU)(fC)(fU)(mG)(mA)(mA)(mA)(fA)(f
G)(rA)(rU)(rG)(rU)(rG)(rC)(rC)(rG)(rC)(
rA)(rA)(rC)(rG)(rC)(mU)(mC)(fU)(fG)(rC)
(rC)(mU)(mU)(mC)(mU)(rG)(rG)(rC)(rA)(rU
)(fC)(fG)(fU)#(fU)#(mU)#(mA)
(SG-12);
(SEQ ID NO: 120)
(mN)#(mN)#(mN)#(mN)(mN)(rN)(rN)(rN)(mN)
(mN)(mN)(rN)(mN)(rN)(rN)(rN)(rN)(mN)(rN
)(rN)(rN)(mN)(rN)(rN)(fG)(rU)(rU)(rG)(f
U)(fA)(fG)(fC)(rU)(rC)(rC)(rC)(mG)(mA)(
mA)(mA)(mC)(rG)(mU)(rU)(fG)(fC)(rU)(fA)
(fC)(rA)(rA)(rU)(rA)(rA)(rG)(rG)(mC)(mC
)(rG)(mU)(mC)(mU)(mG)(mA)(mA)(mA)(mA)(m
G)(rA)(rU)(rG)(rU)(rG)(rC)(rC)(rG)(rC)(
rA)(rA)(rC)(rG)(rC)(mU)(mC)(mU)(mG)(rC)
(rC)(mU)(mU)(mC)(mU)(rG)(rG)(rC)(rA)(rU
)(mC)(mG)(mU)#(mU)#(mU)#(mA)
(SG-13);
(SEQ ID NO: 121)
(mN)#(mN)#(mN)#(mN)(mN)(rN)(rN)(rN)(mN)
(mN)(mN)(rN)(mN)(rN)(rN)(rN)(rN)(mN)(rN
)(rN)(rN)(mN)(rN)(rN)(fG)(rU)(rU)(rG)(f
U)(fA)(fG)(fC)(rU)(rC)(rC)(rC)(mG)(mA)(
mA)(mA)(mC)(rG)(mU)(rU)(IG)(fC)(rU)(fA)
(fC)(rA)(rA)(rU)(rA)(TA)(rG)(rG)(fC)(fC
)(rG)(fU)(fC)(fU)(mG)(mA)(mA)(mA)(fA)(f
G)(rA)(rU)(rG)(rU)(rG)(rC)(rC)(rG)(rC)(
rA)(rA)(rC)(rG)(rC)(mU)(mC)(fU)(fG)(rC)
(rC)(mU)(mU)(mC)(mU)(rG)(rG)(rC)(rA)(rU
)(fC)(fG)(fU)#(fU)#(mU)#(mA)
(SG-14);
(SEQ ID NO: 122)
mN#mN#mN#rNrNrNrNrNrNrNrNrNrNrNrNrNrNrN
rNrNrNrNrNrNrGrUrUrGrUrArGrCrUrCrCrCrGr
ArArArCrGrUrUrGrCrUrArCrArArUrArArGrGrC
rCrGrUrCrUrGrArArArArGrArUrGrUrGrCrCrGr
CrArArCrGrCrUrCrUrGrCrCrCrCrUrUrArArArG
rCrUrCrCrUrGrCrUrUrUrArArGrGrGrGrCrArUr
CrGrUmU#mU#mA
(SG121-0);
(SEQ ID NO: 123)
mN#mN#mN#mNmNrNrNrNrNrNrNrNrNrNrNrNrNrN
rNrNrNrNrNrNrGrUrUrGrUrArGrCrUrCrCrCmGm
AmAmArCrGrUrUrGrCrUrArCrArArUrArArGrGrC
rCrGmUmCmUmGmAmAmAmAmGrArUrGrUrGrCrCrGr
CrArArCrGrCrUrCrUrGrCrCmCmCmUmUmAmAmAmG
mCmUmCmCmUmGmCmUmUmUmAmAmGmGrGrGrCrArUm
CmGmU#mU#mU#mA
(SG121-2);
(SEQ ID NO: 124)
mN#mN#mN#mNmNrNrNrNmNmNmNrNmNrNrNrNrNmN
rNrNrNmNrNrNmGrUrUrGmUmAmGmCrUrCrCrCmGm
AmAmArCrGrUrUrGrCrUrArCrArArUrArArGrGrC
rCrGmUmCmUmGmAmAmAmAmGrArUrGrUrGrCrCrGr
CrArArCrGrCrUrCrUrGrCrCmCmCmUmUmAmAmAmG
mCmUmCmCmUmGmCmUmUmUmAmAmGmGrGrGrCrArUm
CmGmU#mU#mU#mA
(SG121-3);
and
(SEQ ID NO: 125)
mN#mN#mN#mNmNmNmNmNmNmNmNmNmNmNrNrNrNmN
rNrNrNmNrNrNmGrUrUrGmUmAmGmCrUrCrCrCmGm
AmAmArCrGrUrUrGrCrUrArCrArArUrArArGrGrC
rCrGmUmCmUmGmAmAmAmAmGrArUrGrUrGrCrCrGr
CrArArCrGrCrUrCrUrGrCrCmCmCmUmUmAmAmAmG
mCmUmCmCmUmGmCmUmUmUmAmAmGmGrGrGrCrArUm
CmGmU#mU#mU#mA
(SG121-4),

wherein rN=RNA, mN=2′-O-methyl RNA, fN=2′-fluoro RNA, N #N=phosphorothioate linkage, and N=any nucleotide.

[0055] In certain embodiments, the chemically modified Nme gRNA or sgRNA further comprise at least one moiety conjugated to the gRNA or sgRNA.

[0056] In certain embodiments, the at least one moiety is conjugated to at least one of the 5′ end of the crRNA portion, the 3′ end of the crRNA portion, the 5′ end of the tracrRNA portion, the 3′ end of the tracrRNA portion, the 5′ end of the sgRNA, and the 3′ end of the sgRNA.

[0057] In certain embodiments, the at least one moiety increases cellular uptake of the gRNA or sgRNA. In certain embodiments, the at least one moiety promotes specific tissue distribution of the gRNA or sgRNA.

[0058] In certain embodiments, the at least one moiety is selected from the group consisting of fatty acids, steroids, secosteroids, lipids, gangliosides analogs, nucleoside analogs, endocannabinoids, vitamins, receptor ligands, peptides, aptamers, and alkyl chains. In certain embodiments, the at least one moiety is selected from the group consisting of cholesterol, docosahexaenoic acid (DHA), docosanoic acid (DCA), lithocholic acid (LA), GalNAc, amphiphilic block copolymer (ABC), hydrophilic block copolymer (HBC), poloxamer, Cy5, and Cy3.

[0059] In certain embodiments, the at least one moiety is conjugated to the gRNA or sgRNA via a linker. In certain embodiments, the linker is selected from the group consisting of an ethylene glycol chain, an alkyl chain, a polypeptide, a polysaccharide, and a block copolymer.

[0060] In certain embodiments, the at least one moiety is a modified lipid. In certain embodiments, the modified lipid is a branched lipid. In certain embodiments, the modified lipid is a branched lipid of Formula I, Formula I: X-MC(═Y)M-Z-[L-MC(═Y)M-R]n, where X is a moiety that links the lipid to the gRNA or sgRNA, each Y is independently oxygen or sulfur, each M is independently CH₂, NH, O or S, Z is a branching group which allows two or three (“n”) chains to be joined to a chemically modified guide RNA, L is an optional linker moiety, and each R is independently a saturated, monounsaturated or polyunsaturated linear or branched moiety from 2 to 30 atoms in length, a sterol, or other hydrophobic group.

[0061] In certain embodiments, the modified lipid is a headgroup-modified lipid. In certain embodiments, the modified lipid is a headgroup-modified lipid of Formula II, Formula II: X-MC(═Y)M-Z[L-MC(═Y)M-R]n-L-K-J, where X is a moiety that links the lipid to the gRNA or sgRNA, each Y is independently oxygen or sulfur, each M is independently CH₂, NH, N-alkyl, O or S, Z is a branching group which allows two or three (“n”) chains to be joined to chemically modified guide RNA, each L is independently an optional linker moiety, and R is a saturated, monounsaturated or polyunsaturated linear or branched moiety from 2 to 30 atoms in length, a sterol, or other hydrophobic group, K is a phosphate, sulfate, or amide and J is an aminoalkane or quaternary aminoalkane group.

[0062] In certain embodiments, the guide RNA binds to a N. meningitidis Cas9 nuclease (NmeCas9) or variant thereof. In certain embodiments, the Nme Cas9 nuclease or variant thereof is Nme1Cas9, Nme2Cas9, or Nme3Cas9. In certain embodiments, the Nme Cas9 nuclease or variant thereof comprises an amino acid sequence with at least 80% identity to an amino acid sequence set forth in SEQ ID NO: 1, 2, or 3.

[0063] In certain embodiments, the NmeCas9 further comprises one or more nuclear localization signal (NLS) polypeptides. In certain embodiments, the NLS polypeptide comprises one or both of a nucleoplasmin NLS and an SV40 NLS.

[0064] In certain embodiments, the NmeCas9 is a variant NmeCas9. In certain embodiments, the variant NmeCas9 comprises one or both of a D16A mutation and a H588A mutation.

[0065] In certain embodiments, the NmeCas9 or variant NmeCas9 is fused to a nucleotide deaminase. In certain embodiments, the nucleotide deaminase is a cytidine deaminase. In certain embodiments, the nucleotide deaminase is an adenosine deaminase. In certain embodiments, the NmeCas9 or variant NmeCas9 further comprises a uracil glycosylase inhibitor.

[0066] In certain embodiments, Cas9 off-target activity is reduced relative to an unmodified gRNA or sgRNA.

[0067] In certain embodiments, Cas9 on-target activity is increased relative to an unmodified gRNA or sgRNA.

[0068] In certain embodiments, the chemically modified Nme gRNA or sgRNA comprises at least about 50% activity relative to an unmodified gRNA or sgRNA.

[0069] In one aspect, the disclosure provides a method of altering expression of a target gene in a cell, comprising contacting the cell with a genome editing system comprising: the chemically modified Nme gRNA or sgRNA described above; and an RNA-guided nuclease or a polynucleotide encoding an RNA-guided nuclease.

[0070] In certain embodiments, the target gene is in a cell in an organism. In certain embodiments, the contacting occurs in vivo. In certain embodiments, the contacting occurs ex vivo or in vitro.

[0071] In certain embodiments, expression of the target gene is knocked out or knocked down.

[0072] In certain embodiments, the sequence of the target gene is modified, edited, corrected or enhanced.

[0073] In certain embodiments, the guide RNA and the RNA-guided nuclease comprise a ribonucleoprotein (RNP) complex.

[0074] In certain embodiments, the RNA-guided nuclease is an N. meningitidis Cas9 (NmeCas9). In certain embodiments, the Nme Cas9 is Nme1 Cas9, Nme2Cas9, or Nme3Cas9.

[0075] In certain embodiments, the NmeCas9 further comprises one or more nuclear localization signal (NLS) polypeptides. In certain embodiments, the NLS polypeptide comprises one or both of a nucleoplasmin NLS and an SV40 NLS.

[0076] In certain embodiments, the NmeCas9 is a variant NmeCas9. In certain embodiments, the variant NmeCas9 comprises one or both of a D16A mutation and a H588A mutation.

[0077] In certain embodiments, the NmeCas9 or variant NmeCas9 is fused to a nucleotide deaminase. In certain embodiments, the nucleotide deaminase is a cytidine deaminase. In certain embodiments, the nucleotide deaminase is an adenosine deaminase. In certain embodiments, the NmeCas9 or variant NmeCas9 further comprises a uracil glycosylase inhibitor.

[0078] In certain embodiments, the polynucleotide encoding an RNA-guided nuclease comprises a vector.

[0079] In certain embodiments, the vector further comprises a polynucleotide encoding a crRNA portion or a tracrRNA portion.

[0080] In certain embodiments, the vector is a viral vector. In certain embodiments, the viral vector is an adeno-associated virus (AAV) vector, an adenovirus vector, or a lentivirus (LV) vector.

[0081] In certain embodiments, the polynucleotide encoding an RNA-guided nuclease comprises an mRNA.

[0082] In certain embodiments, the mRNA is formulated in a lipid nanoparticle (LNP). In certain embodiments, the LNP comprises at least one cationic lipid. In certain embodiments, the LNP further comprises a PEGylated lipid, a helper lipid, and cholesterol or derivative thereof.

[0083] In certain embodiments, expression of the target gene is reduced by at least about 20%.

[0084] In one aspect, the disclosure provides a CRISPR genome editing system comprising: a chemically modified gRNA or sgRNA described above; and an RNA-guided nuclease or a polynucleotide encoding an RNA-guided nuclease.

[0085] In one aspect, the disclosure provides a chemically modified Neisseria meningitidis (Nme) guide RNA (gRNA) comprising: (a) a crRNA portion comprising (i) a guide sequence capable of hybridizing to a target polynucleotide sequence, and (ii) a repeat sequence; and (b) a tracrRNA portion comprising an anti-repeat nucleotide sequence that is complementary to the repeat sequence, wherein the crRNA portion comprises at least 40% modified nucleotides, and wherein the gRNA is capable of binding to an Nme2Cas9 nuclease.

[0086] In one aspect, the disclosure provides a ribonucleoprotein (RNP) complex comprising: i) a Neisseria meningitidis (Nme) Cas9 nuclease; and ii) a chemically modified Nme guide RNA (gRNA), wherein the Nme gRNA comprises: (a) a crRNA portion comprising (i) a guide sequence capable of hybridizing to a target polynucleotide sequence, and (ii) a repeat sequence; and (b) a tracrRNA portion comprising an anti-repeat nucleotide sequence that is complementary to the repeat sequence, wherein the crRNA portion comprises at least 40% modified nucleotides.

[0087] In certain embodiments, the gRNA is capable of binding to the Nme Cas9 nuclease or variant thereof. In certain embodiments, the Nme Cas9 or variant thereof is Nme1 Cas9, Nme2Cas9, or Nme3Cas9.

### BRIEF DESCRIPTION OF THE DRAWINGS

[0088] The foregoing and other features and advantages of the present disclosure will be more fully understood from the following detailed description of illustrative embodiments taken in conjunction with the accompanying drawings. The patent or application file contains at least one drawing executed in color. Copies of this patent or patent application publication with color drawing(s) will be provided by the Office upon request and payment of the necessary fee.

[0089] FIG. 1 depicts editing efficiencies of several 48-nucleotide long Nme chemically modified crRNAs (CR48-2, CR48-154, CR48-155, CR48-190 to CR48-205, and CR48-213 to CR48-227). An unmodified Nme tracrRNA was paired with each crRNA. The Traffic Light Reporter Multi-Cas Variant 1 (TLR-MCV1) reporter cell line was used and transfected with an RNP comprising Nme2Cas9 and the gRNAs. The graphs show the percentages of red fluorescent (RF) cells obtained by fluorescence activated cell sorting (FACS) analysis. Data are mean values of three biological replicates and error bars represent s.e.m.

[0090] FIG. 2 depicts editing efficiencies of several 42-nucleotide long Nme chemically modified crRNAs (CR42-2, CR42-4, CR42-154 to CR42-161, CR42-167 to CR42-189). An unmodified Nme tracrRNA was paired with each crRNA. The TLR-MCV1 reporter cell line was used and transfected with an RNP comprising Nme2Cas9 and the gRNAs. The graphs show the percentages of RF cells obtained by FACS analysis. Data are mean values of three biological replicates and error bars represent s.e.m.

[0091] FIG. 3 depicts editing efficiencies of several 48-nucleotide long Nme chemically modified crRNAs (CR48-199 V1.1 to CR48-199 V1.36). An unmodified Nme tracrRNA was paired with each crRNA. The TLR-MCV1 reporter cell line was used and transfected with an RNP comprising Nme2Cas9 and the gRNAs. The graphs show the percentages of RF cells obtained by FACS analysis. Data are mean values of three biological replicates and error bars represent s.e.m.

[0092] FIG. 4 depicts editing efficiencies of several 48-nucleotide long Nme chemically modified crRNAs (CR48-203 V1.7, CR48-203 V1.10, CR48-203 V1.12, CR48-203 V1.18, CR48-203 V1.19, CR48-203 V1.22. CR48-203 V1.24, CR48-203 V1.30, CR48-203 V1.31, CR48-203 V1.34, CR48-203 V1.36, CR48-203 V1.31*). An unmodified Nme tracrRNA was paired with each crRNA. The TLR-MCV1 reporter cell line was used and transfected with an RNP comprising Nme2Cas9 and the gRNAs. The graphs show the percentages of RF cells obtained by FACS analysis. Data are mean values of three biological replicates and error bars represent s.e.m.

[0093] FIG. 5 depicts editing efficiencies of several 93-nucleotide long Nme chemically modified tracrRNAs (TR-0, TR-1, and TR-2). A minimally modified Nme crRNA (CR48-2) was paired with each tracrRNA. The TLR-MCV1 reporter cell line was used and transfected with an RNP comprising Nme2Cas9 and the gRNAs. The graphs show the percentages of RF cells obtained by FACS analysis. Data are mean values of three biological replicates and error bars represent s.e.m.

[0094] FIG. 6 depicts editing efficiencies of several 103-nucleotide long Nme chemically modified single guide RNAs (sgRNAs) (SG-0 to SG-14). The TLR-MCV1 reporter cell line was used and transfected with an RNP comprising Nme2Cas9 and the gRNAs. The graphs show the percentages of RF cells obtained by FACS analysis. Data are mean values of three biological replicates and error bars represent s.e.m.

[0095] FIG. 7 depicts editing efficiencies of several sgRNAs (SG-1 and SG-5) when co-delivered with an AAV expressing Nme2Cas9. The TLR-MCV1 reporter cell line was used and transduced with the AAV. 50 pmole of the chemically modified gRNAs were co-delivered. The graphs show the percentages of RF cells obtained by FACS analysis. Data are mean values of three biological replicates and error bars represent s.e.m.

[0096] FIG. 8 depicts in vivo editing with Nme2Cas9-SG-5 RNPs. RNPs with a shuttle peptide delivered to the mouse striatum via a bilateral injection targeted the TLR-MCV1 reporter. Immunohistochemical staining of mCherry was performed 1 week after RNP injections.

[0097] FIG. 9 depicts the codelivery of mRNA and sgRNA using 103-nucleotide long Nme chemically modified sgRNAs (SG103-0) vs 121-nucleotide long Nme chemically modified sgRNAs (SG121-0). Nme2Cas9 mRNA was kept constant and end-modified synthetic sgRNA was titrated. The bars represent activity in the TLR-MCV cell line. Data are mean values of two biological replicates and error bars represent s.e.m.

[0098] FIG. 10 depicts the activity of several SG121 modifications (SG121-0, SG121-2, SG121-3, and SG121-4) in targeting human and mouse genomic loci. Human HEK293T cells and mouse Hepa1-6 cells were used for this experiment. SG121 modified guides were electroporated into cells with Nme2Cas9 mRNA. SG121-0, SG121-2, SG121-3, and SG121-4 were used to target human TLR-MCV reporter cell line, Linc01588, LSP1, FancF, and SG121-0, SG121-3 were used to target murine Ttr.
[0099] FIG. 11 depicts the editing activity of several SG121 modified sgRNA with various NMe2 adenosine base editors (ABE) at genomic locus Linc01588. The max editing rate observed within the adenine within the target was plotted.

[0100] FIG. 12 displays editing activity of select heavily modified CR48 variants identified via TLR-MCV screening (CR48-0, CR48-4, CR48-199, CR48-203, CR48-199, 7, CR48-199, 18, and CR48-199.31) along with SG121 guides (SG121-0 and SG121-3). The guides target mouse TTR in Hepa1-6 cells.

### DETAILED DESCRIPTION

[0101] Provided herewith are novel chemically modified crRNAs and tracrRNAs, including heavily or fully chemically modified crRNAs and tracrRNAs. In certain embodiments, crRNAs and tracrRNAs with 5′ and/or 3′ conjugated moieties are provided. In yet other embodiments, crRNAs and tracrRNAs with modifications in the repeat region of the crRNA or the anti-repeat region of the tracrRNA are provided. Methods of using the crRNAs and tracrRNAs of the disclosure for genome editing with a CRISPR nuclease and kits for performing the same are also provided.

[0102] Unless otherwise defined herein, nomenclature used in connection with cell and tissue culture, molecular biology, immunology, microbiology, genetics and protein and nucleic acid chemistry and hybridization described herein are those well-known and commonly used in the art. The methods and techniques provided herein are usually performed according to conventional methods well known in the art and as described in various general and more specific references that are cited and discussed throughout the present specification unless otherwise indicated. Enzymatic reactions and purification techniques are performed according to manufacturer's specifications unless otherwise specified, as commonly accomplished in the art or as described herein. The nomenclature used in connection with, and the laboratory procedures and techniques of, analytical chemistry, synthetic organic chemistry, and medicinal and pharmaceutical chemistry described herein are those well-known and commonly used in the art, unless otherwise specified. Standard techniques are used for chemical syntheses, chemical analyses, pharmaceutical preparation, formulation, and delivery, and treatment of patients.

[0103] Unless otherwise defined herein, scientific and technical terms used herein have the meanings that are commonly understood by those of ordinary skill in the art. In the event of any latent ambiguity, definitions provided herein take precedent over any dictionary or extrinsic definition. Unless otherwise required by context, singular terms shall include pluralities and plural terms shall include the singular. The use of “or” means “and/or” unless stated otherwise. The use of the term “including,” as well as other forms, such as “includes” and “included,” is not limiting.

[0104] So that the disclosure may be more readily understood, certain terms are first defined.

[0105] As used herein, the term “guide RNA” or “gRNA” refer to any nucleic acid that promotes the specific association (or “targeting”) of an RNA-guided nuclease such as a Cas9 to a target sequence (e.g., a genomic or episomal sequence) in a cell.

[0106] As used herein, a “modular” or “dual RNA” guide comprises more than one, and typically two, separate RNA molecules, such as a CRISPR RNA (crRNA) and a trans-activating crRNA (tracrRNA), which are usually associated with one another, for example by duplexing. gRNAs and their component parts are described throughout the literature (see, e.g., Briner et al. Mol. Cell, 56(2), 333-339 (2014), which is incorporated by reference).

[0107] As used herein, a “unimolecular gRNA,” “chimeric gRNA,” or “single guide RNA (sgRNA)” comprises a single RNA molecule. The sgRNA may be a crRNA and tracrRNA linked together. For example, the 3′ end of the crRNA may be linked to the 5′ end of the tracrRNA. A crRNA and a tracrRNA may be joined into a single unimolecular or chimeric gRNA, for example, by means of a four nucleotide (e.g., GAAA) “tetraloop” or “linker” sequence bridging complementary regions of the crRNA (at its 3′ end) and the tracrRNA (at its 5′ end).

[0108] As used herein, a “repeat” sequence or region is a nucleotide sequence at or near the 3′ end of the crRNA which is complementary to an anti-repeat sequence of a tracrRNA.

[0109] As used herein, an “anti-repeat” sequence or region is a nucleotide sequence at or near the 5′ end of the tracrRNA which is complementary to the repeat sequence of a crRNA.

[0110] Additional details regarding guide RNA structure and function, including the gRNA/Cas9 complex for genome editing may be found in, at least, Mali et al. Science, 339(6121), 823-826 (2013); Jiang et al. Nat. Biotechnol. 31(3). 233-239 (2013); Jinek et al. Science, 337(6096), 816-821 (2012); and Sun et al. Mol. Cell, 76, 938-952 (2019), each of which are incorporated herein by reference.

[0111] As used herein, a “guide sequence” or “targeting sequence” refers to the nucleotide sequence of a gRNA, whether unimolecular or modular, that is fully or partially complementary to a target domain or target polynucleotide within a DNA sequence in the genome of a cell where editing is desired. Guide sequences are typically 10-30 nucleotides in length, preferably 16-26 nucleotides in length (for example, 16, 17, 18, 19, 20, 21, 22, 23, 24, 25, or 26 nucleotides in length), and are at or near the 5′ terminus of a Cas9 gRNA.

[0112] As used herein, a “target domain” or “target polynucleotide sequence” is the DNA sequence in a genome of a cell that is complementary to the guide sequence of the gRNA.

[0113] In addition to the targeting domains, gRNAs typically include a plurality of domains that influence the formation or activity of gRNA/Cas9 complexes. For example, as mentioned above, the duplexed structure formed by first and secondary complementarity domains of a gRNA (also referred to as a repeat: anti-repeat duplex) interacts with the recognition (REC) lobe of Cas9 and may mediate the formation of Cas9/gRNA complexes (Nishimasu et al. Cell 156: 935-949 (2014); Nishimasu et al. Cell 162(2), 1113-1126 (2015); Sun et al., supra, each incorporated by reference herein). It should be noted that the first and/or second complementarity domains can contain one or more poly-U tracts, which can be recognized by RNA polymerases as a termination signal. The sequence of the first and second complementarity domains are, therefore, optionally modified to eliminate these tracts and promote the complete in vitro transcription of gRNAs, for example through the use of A-G swaps as described in Briner 2014, or A-U swaps. These and other similar modifications to the first and second complementarity domains are within the scope of the present disclosure.

[0114] Along with the first and second complementarity domains, Cas9 gRNAs typically include two or more additional duplexed regions that are necessary for nuclease activity in vivo but not necessarily in vitro (Nishimasu 2015, supra; Sun et al., supra). A first stem-loop near the 3′ portion of the second complementarity domain is referred to variously as the “proximal domain,” “stem loop 1” (Nishimasu 2014, supra; Nishimasu 2015, supra; Sun et al., supra) and the “nexus” (Briner 2014, supra). One or more additional stem loop structures are generally present near the 3′ end of the gRNA, with the number varying by species: N. meningitidis gRNAs typically include two 3′ stem loops (for a total of four stem loop structures including the repeat: anti-repeat duplex), while S. aureus and other species have only one (for a total of three). A description of conserved stem loop structures (and gRNA structures more generally) organized by species is provided in Briner 2014, which is incorporated herein by reference. Additional details regarding guide RNAs generally may be found in WO2018026976A1, which is incorporated herein by reference.

Chemically Modified N. meningitidis Guide RNA

[0115] The chemically modified Nme guide RNAs of the disclosure possess improved in vivo stability, improved genome editing efficacy, and/or reduced immunotoxicity relative to unmodified or minimally modified guide RNAs.

[0116] Chemically modified guide RNAs of the disclosure contain one or more modified nucleotides comprising a modification in a ribose group, a phosphate group, a nucleobase, or a combination thereof.

[0117] Chemical modifications to the ribose group may include, but are not limited to, 2′-O-methyl, 2′-fluoro, 2′-deoxy, 2′-O-(2-methoxy ethyl) (MOE), 2′-NH₂ (2′-amino), 4′-thio, 2′-O-Allyl, 2′-O-Ethylamine, 2′-O-Cyanoethyl, 2′-O-Acetalester, or a bicyclic nucleotide, such as locked nucleic acid (LNA), 2′-(S)-constrained ethyl (S-cEt), constrained MOE, or 2′-O,4′-C-aminomethylene bridged nucleic acid (2′,4′-BNA^{NC}).

[0118] The term “4′-thio” as used herein corresponds to a ribose group modification where the sugar ring oxygen of the ribose is replaced with a sulfur.

[0119] Chemical modifications to the phosphate group may include, but are not limited to, a phosphorothioate, phosphonoacetate (PACE), thiophosphonoacetate (thioPACE), amide, triazole, phosphonate, or phosphotriester modification.

[0120] In an embodiment, the crRNA portion of the chemically modified guide RNA comprises between 1 and 20 phosphorothioate modifications (i.e., 1, 2, 3, 4, 5, 6, 7, 8, 9, 10, 11, 12, 13, 14, 15, 16, 17, 18, 19, or 20 phosphorothioate modifications). In an embodiment, the crRNA portion of the chemically modified guide RNA comprises between 1 and 20 phosphorothioate modifications (i.e., 1, 2, 3, 4, 5, 6, 7, 8, 9, 10, 11, 12, 13, 14, 15, 16, 17, 18, 19, or 20 phosphorothioate modifications) and comprises at least about 50% activity relative to a guide RNA that does not comprise phosphorothioate modifications (e.g., 50% activity, 60% activity, 70% activity, 80% activity, 90% activity, 95% activity, or 100% activity, relative to a guide RNA that does not comprise phosphorothioate modifications).

[0121] Chemical modifications to the nucleobase may include, but are not limited to, 2-thiouridine, 4-thiouridine, N⁶-methyladenosine, pseudouridine, 2,6-diaminopurine, inosine, thymidine, 5-methylcytosine, 5-substituted pyrimidine, isoguanine, isocytosine, or halogenated aromatic groups.

[0122] The chemically modified guide RNAs may have one or more chemical modifications in the crRNA portion and/or the tracrRNA portion for a modular or dual RNA guide. The chemically modified guide RNAs may also have one or more chemical modifications in the single guide RNA for the unimolecular guide RNA.

[0123] The chemically modified guide RNAs may comprise at least about 40% to about 100% chemically modified nucleotides, at least about 50% to about 100% chemically modified nucleotides, at least about 60% to about 100% chemically modified nucleotides, at least about 70% to about 100% chemically modified nucleotides, at least about 80% to about 100% chemically modified nucleotides, at least about 90% to about 100% chemically modified nucleotides, and at least about 95% to about 100% chemically modified nucleotides.

[0124] The chemically modified guide RNAs may comprise at least about 40% chemically modified nucleotides, at least about 50% chemically modified nucleotides, at least about 60% chemically modified nucleotides, at least about 70% chemically modified nucleotides, at least about 80% chemically modified nucleotides, at least about 90% chemically modified nucleotides, at least about 95% chemically modified nucleotides, at least about 99% chemically modified, or 100% (fully) chemically modified nucleotides.

[0125] The chemically modified guide RNAs may comprise about 40%, about 41%, about 42%, about 43%, about 44%, about 45%, about 46%, about 47%, about 48%, about 49%, about 50%, about 51%, about 52%, about 53%, about 54%, about 55%, about 56%, about 57%, about 58%, about 59%, about 60%, about 61%, about 62%, about 63%, about 64%, about 65%, about 66%, about 67%, about 68%, about 69%, about 70%, about 71%, about 72%, about 73%, about 74%, about 75%, about 76%, about 77%, about 78%, about 79%, about 80%, about 81%, about 82%, about 83%, about 84%, about 85%, about 86%, about 87%, about 88%, about 89%, about 90%, about 91%, about 92%, about 93%, about 94%, about 95%, about 96%, about 97%, about 98%, about 99%, or 100% chemically modified nucleotides.

[0126] The chemically modified guide RNAs may comprise at least about 80%, 81%, 82%, 83%, 84%, 85%, 86%, 87%, 88%, 89%, 90%, 91%, 92%, 93%, 94%, 95%, 96%, 97%, 98%, 99%, or 100% chemically modified nucleotides.

[0127] Guide RNAs that comprise at least about 40% chemically modified nucleotides to at least about 99% chemically modified nucleotides are considered “heavily” modified, as used herein.

[0128] Guide RNAs that comprise 100% chemically modified nucleotides are considered “fully” modified, as used herein.

[0129] In certain exemplary embodiments, the chemically modified guide RNAs may comprise a chemically modified ribose group at about 40% of the guide RNA nucleotides to about 100% of the guide RNA nucleotides, at about 50% of the guide RNA nucleotides to about 100% of the guide RNA nucleotides, at about 60% of the guide RNA nucleotides to about 100% of the guide RNA nucleotides, at about 70% of the guide RNA nucleotides to about 100% of the guide RNA nucleotides, at about 80% of the guide RNA nucleotides to about 100% of the guide RNA nucleotides, at about 90% of the guide RNA nucleotides to about 100% of the guide RNA nucleotides, and at about 95% of the guide RNA nucleotides to about 100% of the guide RNA nucleotides

[0130] In certain exemplary embodiments, the chemically modified guide RNAs may comprise a chemically modified ribose group at about 40% of the guide RNA nucleotides, at about 50% of the guide RNA nucleotides, at about 60% of the guide RNA nucleotides, at about 70% of the guide RNA nucleotides, at about 80% of the guide RNA nucleotides, at about 90% of the guide RNA nucleotides, at about 95% of the guide RNA nucleotides, at about 99% of the guide RNA nucleotides, or at 100% of the guide RNA nucleotides.

[0131] In certain exemplary embodiments, the chemically modified guide RNAs may comprise a chemically modified ribose group at about 40%, about 41%, about 42%, about 43%, about 44%, about 45%, about 46%, about 47%, about 48%, about 49%, about 50%, about 51%, about 52%, about 53%, about 54%, about 55%, about 56%, about 57%, about 58%, about 59%, about 60%, about 61%, about 62%, about 63%, about 64%, about 65%, about 66%, about 67%, about 68%, about 69%, about 70%, about 71%, about 72%, about 73%, about 74%, about 75%, about 76%, about 77%, about 78%, about 79%, about 80%, about 81%, about 82%, about 83%, about 84%, about 85%, about 86%, about 87%, about 88%, about 89%, about 90%, about 91%, about 92%, about 93%, about 94%, about 95%, about 96%, about 97%, about 98%, about 99%, or 100% of the guide RNA nucleotides.

[0132] Guide RNAs that have at least about 40% of the ribose groups chemically modified to at least about 99% of the ribose groups chemically modified are also considered “heavily” modified, as used herein.

[0133] Guide RNAs that have 100% of the ribose groups chemically modified are also considered “fully” modified, as used herein.

[0134] In certain exemplary embodiments, the chemically modified guide RNAs may comprise a chemically modified phosphate group at about 50% of the guide RNA nucleotides to about 100% of the guide RNA nucleotides, at about 60% of the guide RNA nucleotides to about 100% of the guide RNA nucleotides, at about 70% of the guide RNA nucleotides to about 100% of the guide RNA nucleotides, at about 80% of the guide RNA nucleotides to about 100% of the guide RNA nucleotides, at about 90% of the guide RNA nucleotides to about 100% of the guide RNA nucleotides, and at about 95% of the guide RNA nucleotides to about 100% of the guide RNA nucleotides

[0135] In certain exemplary embodiments, the chemically modified guide RNAs may comprise a chemically modified phosphate group at about 50% of the guide RNA nucleotides, at about 60% of the guide RNA nucleotides, at about 70% of the guide RNA nucleotides, at about 80% of the guide RNA nucleotides, at about 90% of the guide RNA nucleotides, at about 95% of the guide RNA nucleotides, at about 99% of the guide RNA nucleotides, or at 100% of the guide RNA nucleotides.

[0136] In certain exemplary embodiments, the chemically modified guide RNAs may comprise a chemically modified phosphate group at about 80%, 81%, 82%, 83%, 84%, 85%, 86%, 87%, 88%, 89%, 90%, 91%, 92%, 93%, 94%, 95%, 96%, 97%, 98%, 99%, or 100% of the guide RNA nucleotides.

[0137] Guide RNAs that have at least about 80% of the phosphate groups chemically modified to at least about 99% of the phosphate groups chemically modified are also considered “heavily” modified, as used herein.

[0138] Guide RNAs that have 100% of the phosphate groups chemically modified are also considered “fully” modified, as used herein.

[0139] In certain exemplary embodiments, the chemically modified guide RNAs may comprise a chemically modified nucleobase at about 40% of the guide RNA nucleotides to about 100% of the guide RNA nucleotides, at about 50% of the guide RNA nucleotides to about 100% of the guide RNA nucleotides, at about 60% of the guide RNA nucleotides to about 100% of the guide RNA nucleotides, at about 70% of the guide RNA nucleotides to about 100% of the guide RNA nucleotides, at about 80% of the guide RNA nucleotides to about 100% of the guide RNA nucleotides, at about 90% of the guide RNA nucleotides to about 100% of the guide RNA nucleotides, and at about 95% of the guide RNA nucleotides to about 100% of the guide RNA nucleotides.

[0140] In certain exemplary embodiments, the chemically modified guide RNAs may comprise a chemically modified nucleobase at about 40% of the guide RNA nucleotides, at about 50% of the guide RNA nucleotides, at about 60% of the guide RNA nucleotides, at about 70% of the guide RNA nucleotides, at about 80% of the guide RNA nucleotides, at about 90% of the guide RNA nucleotides, at about 95% of the guide RNA nucleotides, at about 99% of the guide RNA nucleotides, or at 100% of the guide RNA nucleotides.

[0141] In certain exemplary embodiments, the chemically modified guide RNAs may comprise a chemically modified nucleobase at about 40%, about 41%, about 42%, about 43%, about 44%, about 45%, about 46%, about 47%, about 48%, about 49%, about 50%, about 51%, about 52%, about 53%, about 54%, about 55%, about 56%, about 57%, about 58%, about 59%, about 60%, about 61%, about 62%, about 63%, about 64%, about 65%, about 66%, about 67%, about 68%, about 69%, about 70%, about 71%, about 72%, about 73%, about 74%, about 75%, about 76%, about 77%, about 78%, about 79%, about 80%, about 81%, about 82%, about 83%, about 84%, about 85%, about 86%, about 87%, about 88%, about 89%, about 90%, about 91%, about 92%, about 93%, about 94%, about 95%, about 96%, about 97%, about 98%, about 99%, or 100% of the guide RNA nucleotides.

[0142] Guide RNAs that have at least about 40% of the nucleobases chemically modified to at least about 99% of the nucleobases chemically modified are also considered “heavily” modified, as used herein.

[0143] Guide RNAs that have 100% of the nucleobases chemically modified are also considered “fully” modified, as used herein.

[0144] In certain exemplary embodiments, the chemically modified guide RNAs may comprise any combination of chemically modified ribose groups, chemically modified phosphate groups, and chemically modified nucleobases at about 40% of the guide RNA nucleotides to about 100% of the guide RNA nucleotides, at about 50% of the guide RNA nucleotides to about 100% of the guide RNA nucleotides, at about 60% of the guide RNA nucleotides to about 100% of the guide RNA nucleotides, at about 70% of the guide RNA nucleotides to about 100% of the guide RNA nucleotides, at about 80% of the guide RNA nucleotides to about 100% of the guide RNA nucleotides, at about 90% of the guide RNA nucleotides to about 100% of the guide RNA nucleotides, and at about 95% of the guide RNA nucleotides to about 100% of the guide RNA nucleotides.

[0145] In certain exemplary embodiments, the chemically modified guide RNAs may comprise any combination of chemically modified ribose groups, chemically modified phosphate groups, and chemically modified nucleobases at about 40% of the guide RNA nucleotides, at about 50% of the guide RNA nucleotides, at about 60% of the guide RNA nucleotides, at about 70% of the guide RNA nucleotides, at about 80% of the guide RNA nucleotides, at about 90% of the guide RNA nucleotides, at about 95% of the guide RNA nucleotides, at about 99% of the guide RNA nucleotides, or at 100% of the guide RNA nucleotides.

[0146] In certain exemplary embodiments, the chemically modified guide RNAs may comprise any combination of chemically modified ribose groups, chemically modified phosphate groups, and chemically modified nucleobases at about 40%, about 41%, about 42%, about 43%, about 44%, about 45%, about 46%, about 47%, about 48%, about 49%, about 50%, about 51%, about 52%, about 53%, about 54%, about 55%, about 56%, about 57%, about 58%, about 59%, about 60%, about 61%, about 62%, about 63%, about 64%, about 65%, about 66%, about 67%, about 68%, about 69%, about 70%, about 71%, about 72%, about 73%, about 74%, about 75%, about 76%, about 77%, about 78%, about 79%, about 80%, about 81%, about 82%, about 83%, about 84%, about 85%, about 86%, about 87%, about 88%, about 89%, about 90%, about 91%, about 92%, about 93%, about 94%, about 95%, about 96%, about 97%, about 98%, about 99%, or 100% of the guide RNA nucleotides.

[0147] Guide RNAs that have at least about 80% of any combination of the ribose groups, the phosphate groups, and the nucleobases chemically modified to at least about 99% of the nucleobases chemically modified are also considered “heavily” modified, as used herein.

[0148] Guide RNAs that have 100% of any combination of the ribose groups, the phosphate groups, and the nucleobases chemically modified are also considered “fully” modified, as used herein.

[0149] The heavily and fully chemically modified guide RNAs of the disclosure possess several advantages over the minimally modified guide RNAs in the art. Heavily and fully chemically modified guide RNAs are expected to ease chemical synthesis, further enhance in vivo stability, and provide a scaffold for terminally appended chemical functionalities that facilitate delivery and efficacy during clinical applications to genome editing.

[0150] The chemical modification pattern used in the guide RNA is such that activity of the guide RNA is maintained when paired with an RNA-guided DNA endonuclease, e.g., Nme Cas9.

[0151] In an embodiment, the chemically modified guide RNAs of the disclosure comprise at least about 50% activity relative to an unmodified guide RNA (e.g., 50% activity, 60% activity, 70% activity, 80% activity, 90% activity, 95% activity, or 100% activity, relative to an unmodified guide RNA).

[0152] The activity of a guide RNA can be readily determined by any means known in the art. In an embodiment, % activity is measured with the traffic light reporter (TLR) Multi-Cas Variant 1 system (TLR-MCV1), described below. The TLR-MCV1 system will provide a % fluorescent cells which is a measure of % activity.

[0153] Exemplary chemical modification patterns are described in Table 1 and Table 2 below.

TABLE 1
Exemplary chemical modification patterns for crRNAs

| | | SEQ |
|---|---|---|
| Name | Sequence | ID NO: |
| CR48-2 | (mN)#(mN)#(mN)#(mN)(mN)(rN)(rN)(rN)(rN)(rN)(rN)(rN)(rN)(rN)(rN)(rN)(rN)(rN) | 13 |
| | (rN)(rN)(rN)(rN)(rN)(rN)(rG)(rU)(rU)(rG)(rU)(rA)(rG)(rC)(rU)(rC)(rC)(rC)(rU) | |
| | (mU)(mU)(mC)(mU)(mC)(mA)(mU)(mU)#(mU)#(mC)#(mG) | |
| CR48-154 | (mN)#(mN)#(mN)#(mN)(mN)(mN)(dN)#(mN)(mN)(mN)(mN)(fN)(mN)(fN)(mN)(fN) | 14 |
| | (mN)(mN)(rN)(rN)(rN)(mN)(rN)(rN)(mG)(rU)(rU)(rG)(mU)(mA)(mG)(mC)(rU)(rC) | |
| | (rC)(rC)(rU)(mU)(mU)(mC)(mU)(mC)(mA)(mU)(mU)#(mU)#(mC)#(mG) | |
| CR48-155 | (mN)#(mN)#(mN)#(mN)(mN)(mN)(dN)#(mN)(mN)(mN)(mN)(mN)(mN)(fN)(mN)(fN) | 15 |
| | (mN)(mN)(rN)(rN)(rN)(mN)(rN)(rN)(mG)(rU)(rU)(rG)(mU)(mA)(mG)(mC)(rU)(rC) | |
| | (rC)(rC)(rU)(mU)(mU)(mC)(mU)(mC)(mA)(mU)(mU)#(mU)#(mC)#(mG) | |
| CR48-190 | (mN)#(mN)#(mN)#(mN)(mN)(mN)(dN)#(mN)(mN)(mN)(mN)(fN)(mN)(fN)(mN)(fN) | 16 |
| | (mN)(mN)(rN)(fN)(mN)(mN)(mN)(mN)(mG)(rU)(rU)(rG)(mU)(mA)(mG)(mC)(rU)(rC) | |
| | (rC)(rC)(rU)(mU)(mU)(mC)(mU)(mC)(mA)(mU)(mU)#(mU)#(mC)#(mG) | |
| CR48-191 | (mN)#(mN)#(mN)#(mN)(mN)(mN)(dN)#(mN)(mN)(mN)(mN)(fN)(mN)(fN)(mN)(fN) | 17 |
| | (mN)(mN)(rN)(mN)(fN)(mN)(mN)(mN)(mG)(rU)(rU)(rG)(mU)(mA)(mG)(mC)(rU)(rC) | |
| | (rC)(rC)(rU)(mU)(mU)(mC)(mU)(mC)(mA)(mU)(mU)#(mU)#(mC)#(mG) | |
| CR48-192 | (mN)#(mN)#(mN)#(mN)(mN)(mN)(dN)#(mN)(mN)(mN)(mN)(mN)(mN)(fN)(mN)(fN) | 18 |
| | (mN)(mN)(rN)(fN)(mN)(mN)(mN)(mN)(mG)(rU)(rU)(rG)(mU)(mA)(mG)(mC)(rU) | |
| | (rC)(rC)(rC)(rU)(mU)(mU)(mC)(mU)(mC)(mA)(mU)(mU)#(mU)#(mC)#(mG) | |
| CR48-193 | (mN)#(mN)#(mN)#(mN)(mN)(mN)(dN)#(mN)(mN)(mN)(mN)(mN)(mN)(fN)(mN)(fN) | 19 |
| | (mN)(mN)(rN)(mN)(fN)(mN)(mN)(mN)(mG)(rU)(rU)(rG)(mU)(mA)(mG)(mC)(rU) | |
| | (rC)(rC)(rC)(rU)(mU)(mU)(mC)(mU)(mC)(mA)(mU)(mU)#(mU)#(mC)#(mG) | |
| CR48-194 | (mN)#(mN)#(mN)#(mN)(mN)(mN)(dN)#(mN)(mN)(mN)(mN)(fN)(mN)(fN)(mN)(fN) | 20 |
| | (mN)(mN)(rN)#(fN)(mN)(mN)(mN)(mN)(mG)(rU)(rU)(rG)(mU)(mA)(mG)(mC)(rU) | |
| | (rC)(rC)(rC)(rU)(mU)(mU)(mC)(mU)(mC)(mA)(mU)(mU)#(mU)#(mC)#(mG) | |
| CR48-195 | (mN)#(mN)#(mN)#(mN)(mN)(mN)(dN)#(mN)(mN)(mN)(mN)(fN)(mN)(fN)(mN)(fN) | 21 |
| | (mN)(mN)(rN)#(mN)(fN)(mN)(mN)(mN)(mG)(rU)(rU)(rG)(mU)(mA)(mG)(mC)(rU) | |
| | (rC)(rC)(rC)(rU)(mU)(mU)(mC)(mU)(mC)(mA)(mU)(mU)#(mU)#(mC)#(mG) | |
| CR48-196 | (mN)#(mN)#(mN)#(mN)(mN)(mN)(dN)#(mN)(mN)(mN)(mN)(mN)(mN)(fN)(mN)(fN) | 22 |
| | (mN)(mN)(rN)#(fN)(mN)(mN)(mN)(mN)(mG)(rU)(rU)(rG)(mU)(mA)(mG)(mC)(rU) | |
| | (rC)(rC)(rC)(rU)(mU)(mU)(mC)(mU)(mC)(mA)(mU)(mU)#(mU)#(mC)#(mG) | |
| CR48-197 | (mN)#(mN)#(mN)#(mN)(mN)(mN)(dN)#(mN)(mN)(mN)(mN)(mN)(mN)(fN)(mN)(fN) | 23 |
| | (mN)(mN)(rN)#(mN)(fN)(mN)(mN)(mN)(mG)(rU)(rU)(rG)(mU)(mA)(mG)(mC)(rU) | |
| | (rC)(rC)(rC)(rU)(mU)(mU)(mC)(mU)(mC)(mA)(mU)(mU)#(mU)#(mC)#(mG) | |
| CR48-198 | (mN)#(mN)#(mN)#(mN)(mN)(mN)(dN)#(mN)(mN)(mN)(mN)(fN)(mN)(fN)(mN)(fN) | 24 |
| | (mN)(mN)(mN)(fN)(mN)(mN)(mN)(mN)(mG)(rU)(rU)(rG)(mU)(mA)(mG)(mC)(rU) | |
| | (rC)(rC)(rC)(rU)(mU)(mU)(mC)(mU)(mC)(mA)(mU)(mU)#(mU)#(mC)#(mG) | |
| CR48-199 | (mN)#(mN)#(mN)#(mN)(mN)(mN)(dN)#(mN)(mN)(mN)(mN)(fN)(mN)(fN)(mN)(fN) | 25 |
| | (mN)(mN)(mN)(mN)(fN)(mN)(mN)(mN)(mG)(rU)(rU)(rG)(mU)(mA)(mG)(mC)(rU) | |
| | (rC)(rC)(rC)(rU)(mU)(mU)(mC)(mU)(mC)(mA)(mU)(mU)#(mU)#(mC)#(mG) | |
| CR48-200 | (mN)#(mN)#(mN)#(mN)(mN)(mN)(dN)#(mN)(mN)(mN)(mN)(mN)(mN)(fN)(mN)(fN) | 26 |
| | (mN)(mN)(mN)(fN)(mN)(mN)(mN)(mN)(mG)(rU)(rU)(rG)(mU)(mA)(mG)(mC)(rU) | |
| | (rC)(rC)(rC)(rU)(mU)(mU)(mC)(mU)(mC)(mA)(mU)(mU)#(mU)#(mC)#(mG) | |
| CR48-201 | (mN)#(mN)#(mN)#(mN)(mN)(mN)(dN)#(mN)(mN)(mN)(mN)(mN)(mN)(fN)(mN)(fN) | 27 |
| | (mN)(mN)(mN)(mN)(fN)(mN)(mN)(mN)(mG)(rU)(rU)(rG)(mU)(mA)(mG)(mC)(rU) | |
| | (rC)(rC)(rC)(rU)(mU)(mU)(mC)(mU)(mC)(mA)(mU)(mU)#(mU)#(mC)#(mG) | |
| CR48-202 | (mN)#(mN)#(mN)#(mN)(mN)(mN)(dN)#(mN)(mN)(mN)(mN)(fN)(mN)(fN)(mN)(fN) | 28 |
| | (mN)(mN)(fN)(fN)(mN)(mN)(mN)(mN)(mG)(rU)(rU)(rG)(mU)(mA)(mG)(mC)(rU)(rC) | |
| | (rC)(rC)(rU)(mU)(mU)(mC)(mU)(mC)(mA)(mU)(mU)#(mU)#(mC)#(mG) | |
| CR48-203 | (mN)#(mN)#(mN)#(mN)(mN)(mN)(dN)#(mN)(mN)(mN)(mN)(fN)(mN)(fN)(mN)(fN) | 29 |
| | (mN)(mN)(fN)(mN)(fN)(mN)(mN)(mN)(mG)(rU)(rU)(rG)(mU)(mA)(mG)(mC)(rU) | |
| | (rC)(rC)(rC)(rU)(mU)(mU)(mC)(mU)(mC)(mA)(mU)(mU)#(mU)#(mC)#(mG) | |
| CR48-204 | (mN)#(mN)#(mN)#(mN)(mN)(mN)(dN)#(mN)(mN)(mN)(mN)(mN)(mN)(fN)(mN)(fN) | 30 |
| | (mN)(mN)(fN)(fN)(mN)(mN)(mN)(mN)(mG)(rU)(rU)(rG)(mU)(mA)(mG)(mC)(rU) | |
| | (rC)(rC)(rC)(rU)(mU)(mU)(mC)(mU)(mC)(mA)(mU)(mU)#(mU)#(mC)#(mG) | |
| CR48-205 | (mN)#(mN)#(mN)#(mN)(mN)(mN)(dN)#(mN)(mN)(mN)(mN)(mN)(mN)(fN)(mN)(fN) | 31 |
| | (mN)(mN)(fN)(mN)(fN)(mN)(mN)(mN)(mG)(rU)(rU)(rG)(mU)(mA)(mG)(mC)(rU) | |
| | (rC)(rC)(rC)(rU)(mU)(mU)(mC)(mU)(mC)(mA)(mU)(mU)#(mU)#(mC)#(mG) | |
| CR48-213 | (mN)#(mN)#(mN)#(mN)(mN)(mN)(dN)#(mN)(mN)(mN)(mN)(mN)(mN)(fN)(mN)(fN) | 32 |
| | (mN)(mN)(rN)(rN)(rN)(mN)(rN)(rN)(mG)(dT)#(rU)(mG)(mU)(mA)(mG)(mC)(rU) | |
| | (rC)(rC)(rC)(rU)(mU)(mU)(mC)(mU)(mC)(mA)(mU)(mU)#(mU)#(mC)#(mG) | |
| CR48-214 | (mN)#(mN)#(mN)#(mN)(mN)(mN)(dN)#(mN)(mN)(mN)(mN)(mN)(mN)(fN)(mN)(fN) | 33 |
| | (mN)(mN)(rN)(rN)(rN)(mN)(rN)(rN)(mG)(dT)#(rU)(mG)(mU)(mA)(mG)(mC)(rU) | |
| | (rC)(mC)(rC)(rU)(mU)(mU)(mC)(mU)(mC)(mA)(mU)(mU)#(mU)#(mC)#(mG) | |
| CR48-215 | (mN)#(mN)#(mN)#(mN)(mN)(mN)(dN)#(mN)(mN)(mN)(mN)(mN)(mN)(fN)(mN)(fN) | 34 |
| | (mN)(mN)(rN)(rN)(rN)(mN)(rN)(rN)(mG)(dT)#(rU)(mG)(mU)(mA)(mG)(mC)(rU) | |
| | (rC)(rC)(mC)(rU)(mU)(mU)(mC)(mU)(mC)(mA)(mU)(mU)#(mU)#(mC)#(mG) | |
| CR48-216 | (mN)#(mN)#(mN)#(mN)(mN)(mN)(dN)#(mN)(mN)(mN)(mN)(mN)(mN)(fN)(mN)(fN) | 35 |
| | (mN)(mN)(rN)(rN)(rN)(mN)(rN)(rN)(mG)(dT)#(rU)(mG)(mU)(mA)(mG)(mC)(rU) | |
| | (rC)(mC)(mC)(rU)(mU)(mU)(mC)(mU)(mC)(mA)(mU)(mU)#(mU)#(mC)#(mG) | |
| CR48-217 | (mN)#(mN)#(mN)#(mN)(mN)(mN)(dN)#(mN)(mN)(mN)(mN)(mN)(mN)(fN)(mN)(fN) | 36 |
| | (mN)(mN)(rN)(rN)(rN)(mN)(rN)(rN)(mG)(rU)(rU)(rG)(mU)(mA)(mG)(mC)(dT)#(rC) | |
| | (rC)(rC)(rU)(mU)(mU)(mC)(mU)(mC)(mA)(mU)(mU)#(mU)#(mC)#(mG) | |
| CR48-218 | (mN)#(mN)#(mN)#(mN)(mN)(mN)(dN)#(mN)(mN)(mN)(mN)(mN)(mN)(fN)(mN)(fN) | 37 |
| | (mN)(mN)(rN)(rN)(rN)(mN)(rN)(rN)(mG)(rU)(rU)(rG)(mU)(mA)(mG)(mC)(rU)(dC) | |
| | #(rC)(rC)(rU)(mU)(mU)(mC)(mU)(mC)(mA)(mU)(mU)#(mU)#(mC)#(mG) | |
| CR48-219 | (mN)#(mN)#(mN)#(mN)(mN)(mN)(dN)#(mN)(mN)(mN)(mN)(mN)(mN)(fN)(mN)(fN) | 38 |
| | (mN)(mN)(rN)(rN)(rN)(mN)(rN)(rN)(mG)(rU)(rU)(rG)(mU)(mA)(mG)(mC)(rU)(rC) | |
| | (dC)#(rC)(rU)(mU)(mU)(mC)(mU)(mC)(mA)(mU)(mU)#(mU)#(mC)#(mG) | |
| CR48-220 | (mN)#(mN)#(mN)#(mN)(mN)(mN)(dN)#(mN)(mN)(mN)(mN)(mN)(mN)(fN)(mN)(fN) | 39 |
| | (mN)(mN)(rN)(rN)(rN)(mN)(rN)(rN)(mG)(rU)(rU)(rG)(mU)(mA)(mG)(mC)(rU)(rC) | |
| | (rC)(dC)#(rU)(mU)(mU)(mC)(mU)(mC)(mA)(mU)(mU)#(mU)#(mC)#(mG) | |
| CR48-221 | (mN)#(mN)#(mN)#(mN)(mN)(mN)(dN)#(mN)(mN)(mN)(mN)(mN)(mN)(fN)(mN)(fN) | 40 |
| | (mN)(mN)(rN)(rN)(rN)(mN)(rN)(rN)(mG)(rU)(rU)(rG)(mU)(mA)(mG)(mC)(rU)(rC) | |
| | (rC)(rC)(dT)#(mU)(mU)(mC)(mU)(mC)(mA)(mU)(mU)#(mU)#(mC)#(mG) | |
| CR48-222 | (mN)#(mN)#(mN)#(mN)(mN)(mN)(dN)#(mN)(mN)(mN)(mN)(mN)(mN)(fN)(mN)(fN) | 41 |
| | (mN)(mN)(rN)(rN)(rN)(mN)(rN)(rN)(mG)(rU)(rU)(rG)(mU)(mA)(mG)(mC)(dT)#(rC) | |
| | (dC)#(rC)(dT)#(mU)(mU)(mC)(mU)(mC)(mA)(mU)(mU)#(mU)#(mC)#(mG) | |
| CR48-223 | (mN)#(mN)#(mN)#(mN)(mN)(mN)(dN)#(mN)(mN)(mN)(mN)(mN)(mN)(fN)(mN)(fN) | 42 |
| | (mN)(mN)(rN)(rN)(rN)(mN)(rN)(rN)(mG)(dT)#(rU)(rG)(mU)(mA)(mG)(mC)(dT)# | |
| | (dC)#(dC)#(rC)(dT)#(mU)(mU)(mC)(mU)(mC)(mA)(mU)(mU)#(mU)#(mC)#(mG) | |
| CR48-224 | (mN)#(mN)#(mN)#(mN)(mN)(mN)(dN)#(mN)(mN)(mN)(mN)(mN)(mN)(fN)(mN)(fN) | 43 |
| | (mN)(mN)(rN)(rN)(rN)(mN)(rN)(rN)(mG)(dT)#(rU)(mG)(mU)(mA)(mG)(mC)(dT)# | |
| | (rC)(mC)(rC)(dT)#(mU)(mU)(mC)(mU)(mC)(mA)(mU)(mU)#(mU)#(mC)#(mG) | |
| CR48-225 | (mN)#(mN)#(mN)#(mN)(mN)(mN)(dN)#(mN)(mN)(mN)(mN)(mN)(mN)(fN)(mN)(fN) | 44 |
| | (mN)(mN)(rN)(rN)(rN)(mN)(rN)(rN)(mG)(dT)#(rU)(mG)(mU)(mA)(mG)(mC)(dT)# | |
| | (rC)(dC)#(mC)(dT)#(mU)(mU)(mC)(mU)(mC)(mA)(mU)(mU)#(mU)#(mC)#(mG) | |
| CR48-226 | (mN)#(mN)#(mN)#(mN)(mN)(mN)(dN)#(mN)(mN)(mN)(mN)(mN)(mN)(fN)(mN)(fN) | 45 |
| | (mN)(mN)(rN)(rN)(rN)(mN)(rN)(rN)(mG)(dT)#(rU)(mG)(mU)(mA)(mG)(mC)(dT)# | |
| | (rC)(mC)(mC)(dT)#(mU)(mU)(mC)(mU)(mC)(mA)(mU)(mU)#(mU)#(mC)#(mG) | |
| CR48-227 | (mN)#(mN)#(mN)#(mN)(mN)(mN)(dN)#(mN)(mN)(mN)(mN)(mN)(mN)(fN)(mN)(fN) | 46 |
| | (mN)(mN)(rN)(rN)(rN)(mN)(rN)(rN)(mG)(dT)#(rU)(mG)(mU)(mA)(mG)(mC)(dT)# | |
| | (dC)#(mC)(mC)(dT)#(mU)(mU)(mC)(mU)(mC)(mA)(mU)(mU)#(mU)#(mC)#(mG) | |
| CR48-199- | (mN)#(mN)#(mN)#(mN)(mN)(mN)(dN)#(mN)(mN)(mN)(mN)(fN)(mN)(fN)(mN)(fN) | 47 |
| V1.1 | (mN)(mN)(mN)(mN)(fN)(mN)(mN)(mN)(mG)(rU)(rU)(mG)(mU)(mA)(mG)(mC)(rU) | |
| | (rC)(rC)(dC)#(rU)(mU)(mU)(mC)(mU)(mC)(mA)(mU)(mU)#(mU)#(mC)#(mG) | |
| CR48-199- | (mN)#(mN)#(mN)#(mN)(mN)(mN)(dN)#(mN)(mN)(mN)(mN)(fN)(mN)(fN)(mN)(fN) | 48 |
| V1.2 | (mN)(mN)(mN)(mN)(fN)(mN)(mN)(mN)(mG)(rU)(rU)(mG)(mU)(mA)(mG)(mC)(rU) | |
| | (rC)(dC)#(rC)(rU)(mU)(mU)(mC)(mU)(mC)(mA)(mU)(mU)#(mU)#(mC)#(mG) | |
| CR48-199- | (mN)#(mN)#(mN)#(mN)(mN)(mN)(dN)#(mN)(mN)(mN)(mN)(fN)(mN)(fN)(mN)(fN) | 49 |
| V1.3 | (mN)(mN)(mN)(mN)(fN)(mN)(mN)(mN)(mG)(rU)(rU)(mG)(mU)(mA)(mG)(mC)(rU) | |
| | (rC)(rC)(rC)(dT)#(mU)(mU)(mC)(mU)(mC)(mA)(mU)(mU)#(mU)#(mC)#(mG) | |
| CR48-199- | (mN)#(mN)#(mN)#(mN)(mN)(mN)(dN)#(mN)(mN)(mN)(mN)(fN)(mN)(fN)(mN)(fN) | 50 |
| V1.4 | (mN)(mN)(mN)(mN)(fN)(mN)(mN)(mN)(mG)(rU)(rU)(mG)(mU)(mA)(mG)(mC)(rU) | |
| | (rC)(mC)(rC)(rU)(mU)(mU)(mC)(mU)(mC)(mA)(mU)(mU)#(mU)#(mC)#(mG) | |
| CR48-199- | (mN)#(mN)#(mN)#(mN)(mN)(mN)(dN)#(mN)(mN)(mN)(mN)(N)(mN)(fN)(mN)(fN) | 51 |
| V1.5 | (mN)(mN)(mN)(mN)(fN)(mN)(mN)(mN)(mG)(rU)(rU)(mG)(mU)(mA)(mG)(mC)(rU) | |
| | (rC)(dC)#(dC)#(rU)(mU)(mU)(mC)(mU)(mC)(mA)(mU)(mU)#(mU)#(mC)#(mG) | |
| CR48-199- | (mN)#(mN)#(mN)#(mN)(mN)(mN)(dN)#(mN)(mN)(mN)(mN)(fN)(mN)(fN)(mN)(fN) | 52 |
| V1.6 | (mN)(mN)(mN)(mN)(fN)(mN)(mN)(mN)(mG)(rU)(rU)(mG)(mU)(mA)(mG)(mC)(rU) | |
| | (rC)(dC)#(rC)(dT)#(mU)(mU)(mC)(mU)(mC)(mA)(mU)(mU)#(mU)#(mC)#(mG) | |
| CR48-199- | (mN)#(mN)#(mN)#(mN)(mN)(mN)(dN)#(mN)(mN)(mN)(mN)(fN)(mN)(fN)(mN)(fN) | 53 |
| V1.7 | (mN)(mN)(mN)(mN)(fN)(mN)(mN)(mN)(mG)(rU)(rU)(mG)(mU)(mA)(mG)(mC)(rU) | |
| | (rC)(dC)#(dC)#(dT)#(mU)(mU)(mC)(mU)(mC)(mA)(mU)(mU)#(mU)#(mC)#(mG) | |
| CR48-199- | (mN)#(mN)#(mN)#(mN)(mN)(mN)(dN)#(mN)(mN)(mN)(mN)(fN)(mN)(fN)(mN)(fN) | 54 |
| V1.8 | (mN)(mN)(mN)(mN)(fN)(mN)(mN)(mN)(mG)(rU)(rU)(mG)(mU)(mA)(mG)(mC)(rU) | |
| | (rC)(mC)(dC)#(rU)(mU)(mU)(mC)(mU)(mC)(mA)(mU)(mU)#(mU)#(mC)#(mG) | |
| CR48-199- | (mN)#(mN)#(mN)#(mN)(mN)(mN)(dN)#(mN)(mN)(mN)(mN)(fN)(mN)(fN)(mN)(fN) | 55 |
| V1.9 | (mN)(mN)(mN)(mN)(fN)(mN)(mN)(mN)(mG)(rU)(rU)(mG)(mU)(mA)(mG)(mC)(rU) | |
| | (rC)(mC)(rC)(dT)#(mU)(mU)(mC)(mU)(mC)(mA)(mU)(mU)#(mU)#(mC)#(mG) | |
| CR48-199- | (mN)#(mN)#(mN)#(mN)(mN)(mN)(dN)#(mN)(mN)(mN)(mN)(fN)(mN)(fN)(mN)(fN) | 56 |
| V1.10 | (mN)(mN)(mN)(mN)(fN)(mN)(mN)(mN)(mG)(rU)(rU)(mG)(mU)(mA)(mG)(mC)(rU) | |
| | (rC)(mC)(dC)#(dT)#(mU)(mU)(mC)(mU)(mC)(mA)(mU)(mU)#(mU)#(mC)#(mG) | |
| CR48-199- | (mN)#(mN)#(mN)#(mN)(mN)(mN)(dN)#(mN)(mN)(mN)(mN)(fN)(mN)(fN)(mN)(fN) | 57 |
| V1.11 | (mN)(mN)(mN)(mN)(fN)(mN)(mN)(mN)(mG)(rU)(rU)(mG)(mU)(mA)(mG)(mC)(rU) | |
| | (rC)(mC)(mC)(rU)(mU)(mU)(mC)(mU)(mC)(mA)(mU)(mU)#(mU)#(mC)#(mG) | |
| CR48-199- | (mN)#(mN)#(mN)#(mN)(mN)(mN)(dN)#(mN)(mN)(mN)(mN)(fN)(mN)(fN)(mN)(fN) | 58 |
| V1.12 | (mN)(mN)(mN)(mN)(fN)(mN)(mN)(mN)(mG)(rU)(rU)(mG)(mU)(mA)(mG)(mC)(rU) | |
| | (rC)(mC)(mC)(dT)#(mU)(mU)(mC)(mU)(mC)(mA)(mU)(mU)#(mU)#(mC)#(mG) | |
| CR48-199- | (mN)#(mN)#(mN)#(mN)(mN)(mN)(dN)#(mN)(mN)(mN)(mN)(fN)(mN)(fN)(mN)(fN) | 59 |
| V1.13 | (mN)(mN)(mN)(mN)(fN)(mN)(mN)(mN)(mG)(rU)(rU)(mG)(mU)(mA)(mG)(mC)(dT)# | |
| | (rC)(rC)(dC)#(rU)(mU)(mU)(mC)(mU)(mC)(mA)(mU)(mU)#(mU)#(mC)#(mG) | |
| CR48-199- | (mN)#(mN)#(mN)#(mN)(mN)(mN)(dN)#(mN)(mN)(mN)(mN)(fN)(mN)(fN)(mN)(fN) | 60 |
| V1.14 | (mN)(mN)(mN)(mN)(fN)(mN)(mN)(mN)(mG)(rU)(rU)(mG)(mU)(mA)(mG)(mC)(dT)# | |
| | (rC)(dC)#(rC)(rU)(mU)(mU)(mC)(mU)(mC)(mA)(mU)(mU)#(mU)#(mC)#(mG) | |
| CR48-199- | (mN)#(mN)#(mN)#(mN)(mN)(mN)(dN)#(mN)(mN)(mN)(mN)(fN)(mN)(fN)(mN)(fN) | 61 |
| V1.15 | (mN)(mN)(mN)(mN)(fN)(mN)(mN)(mN)(mG)(rU)(rU)(mG)(mU)(mA)(mG)(mC)(dT)# | |
| | (rC)(rC)(rC)(dT)#(mU)(mU)(mC)(mU)(mC)(mA)(mU)(mU)#(mU)#(mC)#(mG) | |
| CR48-199- | (mN)#(mN)#(mN)#(mN)(mN)(mN)(dN)#(mN)(mN)(mN)(mN)(fN)(mN)(fN)(mN)(fN) | 62 |
| V1.16 | (mN)(mN)(mN)(mN)(fN)(mN)(mN)(mN)(mG)(rU)(rU)(mG)(mU)(mA)(mG)(mC)(dT)# | |
| | (rC)(mC)(rC)(rU)(mU)(mU)(mC)(mU)(mC)(mA)(mU)(mU)#(mU)#(mC)#(mG) | |
| CR48-199- | (mN)#(mN)#(mN)#(mN)(mN)(mN)(dN)#(mN)(mN)(mN)(mN)(fN)(mN)(fN)(mN)(fN) | 63 |
| V1.17 | (mN)(mN)(mN)(mN)(fN)(mN)(mN)(mN)(mG)(rU)(rU)(mG)(mU)(mA)(mG)(mC)(dT)# | |
| | (rC)(dC)#(dC)#(rU)(mU)(mU)(mC)(mU)(mC)(mA)(mU)(mU)#(mU)#(mC)#(mG) | |
| CR48-199- | (mN)#(mN)#(mN)#(mN)(mN)(mN)(dN)#(mN)(mN)(mN)(mN)(fN)(mN)(fN)(mN)(fN) | 64 |
| V1.18 | (mN)(mN)(mN)(mN)(fN)(mN)(mN)(mN)(mG)(rU)(rU)(mG)(mU)(mA)(mG)(mC)(dT)# | |
| | (rC)(dC)#(rC)(dT)#(mU)(mU)(mC)(mU)(mC)(mA)(mU)(mU)#(mU)#(mC)#(mG) | |
| CR48-199- | (mN)#(mN)#(mN)#(mN)(mN)(mN)(dN)#(mN)(mN)(mN)(mN)(fN)(mN)(fN)(mN)(fN) | 65 |
| V1.19 | (mN)(mN)(mN)(mN)(fN)(mN)(mN)(mN)(mG)(rU)(rU)(mG)(mU)(mA)(mG)(mC)(dT)# | |
| | (rC)(dC)#(dC)#(dT)#(mU)(mU)(mC)(mU)(mC)(mA)(mU)(mU)#(mU)#(mC)#(mG) | |
| CR48-199- | (mN)#(mN)#(mN)#(mN)(mN)(mN)(dN)#(mN)(mN)(mN)(mN)(fN)(mN)(fN)(mN)(fN) | 66 |
| V1.20 | (mN)(mN)(mN)(mN)(fN)(mN)(mN)(mN)(mG)(rU)(rU)(mG)(mU)(mA)(mG)(mC)(dT)# | |
| | (rC)(mC)(dC)#(rU)(mU)(mU)(mC)(mU)(mC)(mA)(mU)(mU)#(mU)#(mC)#(mG) | |
| CR48-199- | (mN)#(mN)#(mN)#(mN)(mN)(mN)(dN)#(mN)(mN)(mN)(mN)(fN)(mN)(fN)(mN)(fN) | 67 |
| V1.21 | (mN)(mN)(mN)(mN)(fN)(mN)(mN)(mN)(mG)(rU)(rU)(mG)(mU)(mA)(mG)(mC)(dT)# | |
| | (rC)(mC)(rC)(dT)#(mU)(mU)(mC)(mU)(mC)(mA)(mU)(mU)#(mU)#(mC)#(mG) | |
| CR48-199- | (mN)#(mN)#(mN)#(mN)(mN)(mN)(dN)#(mN)(mN)(mN)(mN)(fN)(mN)(fN)(mN)(fN) | 68 |
| V1.22 | (mN)(mN)(mN)(mN)(fN)(mN)(mN)(mN)(mG)(rU)(rU)(mG)(mU)(mA)(mG)(mC)(dT)# | |
| | (rC)(mC)(dC)#(dT)#(mU)(mU)(mC)(mU)(mC)(mA)(mU)(mU)#(mU)#(mC)#(mG) | |
| CR48-199- | (mN)#(mN)#(mN)#(mN)(mN)(mN)(dN)#(mN)(mN)(mN)(mN)(N)(mN)(fN)(mN)(fN) | 69 |
| V1.23 | (mN)(mN)(mN)(mN)(fN)(mN)(mN)(mN)(mG)(rU)(rU)(mG)(mU)(mA)(mG)(mC)(dT)# | |
| | (rC)(mC)(mC)(rU)(mU)(mU)(mC)(mU)(mC)(mA)(mU)(mU)#(mU)#(mC)#(mG) | |
| CR48-199- | (mN)#(mN)#(mN)#(mN)(mN)(mN)(dN)#(mN)(mN)(mN)(mN)(fN)(mN)(fN)(mN)(fN) | 70 |
| V1.24 | (mN)(mN)(mN)(mN)(fN)(mN)(mN)(mN)(mG)(rU)(rU)(mG)(mU)(mA)(mG)(mC)(dT)# | |
| | (rC)(mC)(mC)(dT)#(mU)(mU)(mC)(mU)(mC)(mA)(mU)(mU)#(mU)#(mC)#(mG) | |
| CR48-199- | (mN)#(mN)#(mN)#(mN)(mN)(mN)(dN)#(mN)(mN)(mN)(mN)(fN)(mN)(fN)(mN)(fN) | 71 |
| V1.25 | (mN)(mN)(mN)(mN)(IN)(mN)(mN)(mN)(mG)(dT)#(rU)(mG)(mU)(mA)(mG)(mC)(dT) | |
| | #(rC)(rC)(dC)#(rU)(mU)(mU)(mC)(mU)(mC)(mA)(mU)(mU)#(mU)#(mC)#(mG) | |
| CR48-199- | (mN)#(mN)#(mN)#(mN)(mN)(mN)(dN)#(mN)(mN)(mN)(mN)(fN)(mN)(fN)(mN)(fN) | 72 |
| V1.26 | (mN)(mN)(mN)(mN)(IN)(mN)(mN)(mN)(mG)(dT)#(rU)(mG)(mU)(mA)(mG)(mC)(dT) | |
| | #(rC)(dC)#(rC)(rU)(mU)(mU)(mC)(mU)(mC)(mA)(mU)(mU)#(mU)#(mC)#(mG) | |
| CR48-199- | (mN)#(mN)#(mN)#(mN)(mN)(mN)(dN)#(mN)(mN)(mN)(mN)(fN)(mN)(fN)(mN)(fN) | 73 |
| V1.27 | (mN)(mN)(mN)(mN)(IN)(mN)(mN)(mN)(mG)(dT)#(rU)(mG)(mU)(mA)(mG)(mC)(dT) | |
| | #(rC)(rC)(rC)(dT)#(mU)(mU)(mC)(mU)(mC)(mA)(mU)(mU)#(mU)#(mC)#(mG) | |
| CR48-199- | (mN)#(mN)#(mN)#(mN)(mN)(mN)(dN)#(mN)(mN)(mN)(mN)(fN)(mN)(fN)(mN)(fN) | 74 |
| V1.28 | (mN)(mN)(mN)(mN)(IN)(mN)(mN)(mN)(mG)(dT)#(rU)(mG)(mU)(mA)(mG)(mC)(dT) | |
| | #(rC)(mC)(rC)(rU)(mU)(mU)(mC)(mU)(mC)(mA)(mU)(mU)#(mU)#(mC)#(mG) | |
| CR48-199- | (mN)#(mN)#(mN)#(mN)(mN)(mN)(dN)#(mN)(mN)(mN)(mN)(fN)(mN)(fN)(mN)(fN) | 75 |
| V1.29 | (mN)(mN)(mN)(mN)(IN)(mN)(mN)(mN)(mG)(dT)#(rU)(mG)(mU)(mA)(mG)(mC)(dT) | |
| | #(rC)(dC)#(dC)#(rU)(mU)(mU)(mC)(mU)(mC)(mA)(mU)(mU)#(mU)#(mC)#(mG) | |
| CR48-199- | (mN)#(mN)#(mN)#(mN)(mN)(mN)(dN)#(mN)(mN)(mN)(mN)(fN)(mN)(fN)(mN)(fN) | 76 |
| V1.30 | (mN)(mN)(mN)(mN)(IN)(mN)(mN)(mN)(mG)(dT)#(rU)(mG)(mU)(mA)(mG)(mC)(dT) | |
| | #(rC)(dC)#(rC)(dT)#(mU)(mU)(mC)(mU)(mC)(mA)(mU)(mU)#(mU)#(mC)#(mG) | |
| CR48-199- | (mN)#(mN)#(mN)#(mN)(mN)(mN)(dN)#(mN)(mN)(mN)(mN)(fN)(mN)(fN)(mN)(fN) | 77 |
| V1.31 | (mN)(mN)(mN)(mN)(IN)(mN)(mN)(mN)(mG)(dT)#(rU)(mG)(mU)(mA)(mG)(mC)(dT) | |
| | #(rC)(dC)#(dC)#(dT)#(mU)(mU)(mC)(mU)(mC)(mA)(mU)(mU)#(mU)#(mC)#(mG) | |
| CR48-199- | (mN)#(mN)#(mN)#(mN)(mN)(mN)(dN)#(mN)(mN)(mN)(mN)(fN)(mN)(fN)(mN)(fN) | 78 |
| V1.32 | (mN)(mN)(mN)(mN)(IN)(mN)(mN)(mN)(mG)(dT)#(rU)(mG)(mU)(mA)(mG)(mC)(dT) | |
| | #(rC)(mC)(dC)#(rU)(mU)(mU)(mC)(mU)(mC)(mA)(mU)(mU)#(mU)#(mC)#(mG) | |
| CR48-199- | (mN)#(mN)#(mN)#(mN)(mN)(mN)(dN)#(mN)(mN)(mN)(mN)(fN)(mN)(fN)(mN)(fN) | 79 |
| V1.33 | (mN)(mN)(mN)(mN)(IN)(mN)(mN)(mN)(mG)(dT)#(rU)(mG)(mU)(mA)(mG)(mC)(dT) | |
| | #(rC)(mC)(rC)(dT)#(mU)(mU)(mC)(mU)(mC)(mA)(mU)(mU)#(mU)#(mC)#(mG) | |
| CR48-199- | (mN)#(mN)#(mN)#(mN)(mN)(mN)(dN)#(mN)(mN)(mN)(mN)(fN)(mN)(fN)(mN)(fN) | 80 |
| V1.34 | (mN)(mN)(mN)(mN)(IN)(mN)(mN)(mN)(mG)(dT)#(rU)(mG)(mU)(mA)(mG)(mC)(dT) | |
| | #(rC)(mC)(dC)#(dT)#(mU)(mU)(mC)(mU)(mC)(mA)(mU)(mU)#(mU)#(mC)#(mG) | |
| CR48-199- | (mN)#(mN)#(mN)#(mN)(mN)(mN)(dN)#(mN)(mN)(mN)(mN)(fN)(mN)(fN)(mN)(fN) | 81 |
| V1.35 | (mN)(mN)(mN)(mN)(IN)(mN)(mN)(mN)(mG)(dT)#(rU)(mG)(mU)(mA)(mG)(mC)(dT) | |
| | #(rC)(mC)(mC)(rU)(mU)(mU)(mC)(mU)(mC)(mA)(mU)(mU)#(mU)#(mC)#(mG) | |
| CR48-199- | (mN)#(mN)#(mN)#(mN)(mN)(mN)(dN)#(mN)(mN)(mN)(mN)(fN)(mN)(fN)(mN)(fN) | 82 |
| V1.36 | (mN)(mN)(mN)(mN)(IN)(mN)(mN)(mN)(mG)(dT)#(rU)(mG)(mU)(mA)(mG)(mC)(dT) | |
| | #(rC)(mC)(mC)(dT)#(mU)(mU)(mC)(mU)(mC)(mA)(mU)(mU)#(mU)#(mC)#(mG) | |
| CR48-203- | (mN)#(mN)#(mN)#(mN)(mN)(mN)(dN)#(mN)(mN)(mN)(mN)(fN)(mN)(fN)(mN)(fN) | 83 |
| V1.7 | (mN)(mN)(fN)(mN)(fN)(mN)(mN)(mN)(mG)(rU)(rU)(mG)(mU)(mA)(mG)(mC)(rU) | |
| | (rC)(dC)#(dC)#(dT)#(mU)(mU)(mC)(mU)(mC)(mA)(mU)(mU)#(mU)#(mC)#(mG) | |
| CR48-203- | (mN)#(mN)#(mN)#(mN)(mN)(mN)(dN)#(mN)(mN)(mN)(mN)(fN)(mN)(fN)(mN)(fN) | 84 |
| V1.10 | (mN)(mN)(fN)(mN)(fN)(mN)(mN)(mN)(mG)(rU)(rU)(mG)(mU)(mA)(mG)(mC)(rU) | |
| | (rC)(mC)(dC)#(dT)#(mU)(mU)(mC)(mU)(mC)(mA)(mU)(mU)#(mU)#(mC)#(mG) | |
| CR48-203- | (mN)#(mN)#(mN)#(mN)(mN)(mN)(dN)#(mN)(mN)(mN)(mN)(fN)(mN)(fN)(mN)(fN) | 85 |
| V1.12 | (mN)(mN)(fN)(mN)(fN)(mN)(mN)(mN)(mG)(rU)(rU)(mG)(mU)(mA)(mG)(mC)(rU) | |
| | (rC)(mC)(mC)(dT)#(mU)(mU)(mC)(mU)(mC)(mA)(mU)(mU)#(mU)#(mC)#(mG) | |
| CR48-203- | (mN)#(mN)#(mN)#(mN)(mN)(mN)(dN)#(mN)(mN)(mN)(mN)(fN)(mN)(fN)(mN)(fN) | 86 |
| V1.18 | (mN)(mN)(fN)(mN)(fN)(mN)(mN)(mN)(mG)(rU)(rU)(mG)(mU)(mA)(mG)(mC)(dT)# | |
| | (rC)(dC)#(rC)(dT)#(mU)(mU)(mC)(mU)(mC)(mA)(mU)(mU)#(mU)#(mC)#(mG) | |
| CR48-203- | (mN)#(mN)#(mN)#(mN)(mN)(mN)(dN)#(mN)(mN)(mN)(mN)(N)(mN)(fN)(mN)(fN) | 87 |
| V1.19 | (mN)(mN)(fN)(mN)(fN)(mN)(mN)(mN)(mG)(rU)(rU)(mG)(mU)(mA)(mG)(mC)(dT)# | |
| | (rC)(dC)#(dC)#(dT)#(mU)(mU)(mC)(mU)(mC)(mA)(mU)(mU)#(mU)#(mC)#(mG) | |
| CR48-203- | (mN)#(mN)#(mN)#(mN)(mN)(mN)(dN)#(mN)(mN)(mN)(mN)(fN)(mN)(fN)(mN)(fN) | 88 |
| V1.22 | m(N)(mN)(fN)(mN)(fN)(mN)(mN)(mN)(mG)(rU)(rU)(mG)(mU)(mA)(mG)(mC)(dT)# | |
| | (rC)(mC)(dC)#(dT)#(mU)(mU)(mC)(mU)(mC)(mA)(mU)(mU)#(mU)#(mC)#(mG) | |
| CR48-203- | (mN)#(mN)#(mN)#(mN)(mN)(mN)(dN)#(mN)(mN)(mN)(mN)(fN)(mN)(fN)(mN)(fN) | 89 |
| V1.24 | (mN)(mN)(fN)(mN)(fN)(mN)(mN)(mN)(mG)(rU)(rU)(mG)(mU)(mA)(mG)(mC)(dT)# | |
| | (rC)(mC)(mC)(dT)#(mU)(mU)(mC)(mU)(mC)(mA)(mU)(mU)#(mU)#(mC)#(mG) | |
| CR48-203- | (mN)#(mN)#(mN)#(mN)(mN)(mN)(dN)#(mN)(mN)(mN)(mN)(fN)(mN)(fN)(mN)(fN) | 90 |
| V1.30 | (mN)(mN)(fN)(mN)(fN)(mN)(mN)(mN)(mG)(dT)#(rU)(mG)(mU)(mA)(mG)(mC)(dT)# | |
| | (rC)(dC)#(rC)(dT)#(mU)(mU)(mC)(mU)(mC)(mA)(mU)(mU)#(mU)#(mC)#(mG) | |
| CR48-203- | (mN)#(mN)#(mN)#(mN)(mN)(mN)(dN)#(mN)(mN)(mN)(mN)(fN)(mN)(fN)(mN)(fN) | 91 |
| V1.31 | (mN)(mN)(fN)(mN)(fN)(mN)(mN)(mN)(mG)(dT)#(rU)(mG)(mU)(mA)(mG)(mC)(dT)# | |
| | (rC)(dC)#(dC)#(dT)#(mU)(mU)(mC)(mU)(mC)(mA)(mU)(mU)#(mU)#(mC)#(mG) | |
| CR48-203- | (mN)#(mN)#(mN)#(mN)(mN)(mN)(dN)#(mN)(mN)(mN)(mN)(fN)(mN)(fN)(mN)(fN) | 92 |
| V1.34 | (mN)(mN)(fN)(mN)(fN)(mN)(mN)(mN)(mG)(dT)#(rU)(mG)(mU)(mA)(mG)(mC)(dT)# | |
| | (rC)(mC)(dC)#(dT)#(mU)(mU)(mC)(mU)(mC)(mA)(mU)(mU)#(mU)#(mC)#(mG) | |
| CR48-203- | (mN)#(mN)#(mN)#(mN)(mN)(mN)(dN)#(mN)(mN)(mN)(mN)(fN)(mN)(fN)(mN)(fN) | 93 |
| V1.36 | (mN)(mN)(fN)(mN)(fN)(mN)(mN)(mN)(mG)(dT)#(rU)(mG)(mU)(mA)(mG)(mC)(dT)# | |
| | (rC)(mC)(mC)(dT)#(mU)(mU)(mC)(mU)(mC)(mA)(mU)(mU)#(mU)#(mC)#(mG) | |

KEY:
rN = RNA, mN = 2′-O-methyl RNA, fN = 2’-fluoro RNA, dN = 2’-deoxy RNA, N = A, U, G, or C
N#N = phosphorothioate linkage

TABLE 2
Exemplary chemical modification patterns for tracrRNAs

| | | SEQ |
|---|---|---|
| Name | Sequence | ID NO: |
| TR93-0 | (mC)#(mG)#(mA)#(rA)(rA)(rU)(rG)(rA)(rG)(rA)(rA)(rC)(rC)(rG)(rU) | 94 |
| | (rU)(rG)(rC)(rU)(rA)(rC)(rA)(rA)(rU)(rA)(rA)(rG)(rG)(rC)(rC)(rG)(rU) | |
| | (rC)(rU)(rG)(rA)(rA)(rA)(rA)(rG)(rA)(rU)(rG)(rU)(rG)(rC)(rC)(rG)(rC) | |
| | (rA)(rA)(rC)(rG)(rC)(rU)(rC)(rU)(rG)(rC)(rC)(rC)(rC)(rU)(rU)(rA)(rA) | |
| | (rA)(rG)(rC)(rU)(rC)(rC)(rU)(rG)(rC)(rU)(rU)(rU)(rA)(rA)(rG)(rG)(rG) | |
| | (rG)(rC)(rA)(rU)(rC)(rG)(rU)#(mU)#(mU)#(mA) | |
| TR93-1 | (mC)#(mG)#(mA)#(rA)(rA)(rU)(rG)(rA)(rG)(rA)(rA)(rC)(rC)(rG)(rU) | 95 |
| | (rU)(rG)(rC)(rU)(rA)(rC)(rA)(rA)(rU)(rA)(rA)(rG)(rG)(rC)(rC)(rG)(rU) | |
| | (rC)(rU)(mG)(mA)(mA)(mA)(rA)(rG)(rA)(rU)(rG)(rU)(rG)(rC)(rC)(rG) | |
| | (rC)(rA)(rA)(rC)(rG)(rC)(rU)(rC)(rU)(rG)(rC)(rC)(rC)(rC)(rU)(rU)(rA) | |
| | (rA)(rA)(rG)(rC)(mU)(mC)(mC)(mU)(rG)(rC)(rU)(rU)(rU)(rA)(rA)(rG) | |
| | (rG)(rG)(rG)(rC)(rA)(rU)(rC)(rG)(rU)#(mU)#(mU)#(mA) | |
| TR93-2 | (mC)#(mG)#(mA)#(mA)(mA)(mU)(mG)(mA)(mG)(mA)(mA)(mC)(rC) | 96 |
| | (rG)(rU)(rU)(rG)(rC)(rU)(rA)(rC)(rA)(rA)(rU)(rA)(rA)(rG)(rG)(rC)(rC) | |
| | (rG)(mU)(mC)(mU)(mG)(mA)(mA)(mA)(mA)(mG)(rA)(rU)(rG)(rU)(rG) | |
| | (rC)(rC)(rG)(rC)(rA)(rA)(rC)(rG)(rC)(rU)(rC)(rU)(rG)(rC)(rC)(mC) | |
| | (mC)(mU)(mU)(mA)(mA)(mA)(mG)(mC)(mU)(mC)(mC)(mU)(mG) | |
| | (mC)(mU)(mU)(mU)(mA)(mA)(mG)(mG)(rG)(rG)(rC)(rA)(rU)(mC)(mG) | |
| | (mU)#(mU)#(mU)#(mA) | |

KEY: rN = RNA, mN = 2’-O-methyl RNA, fN = 2’-fluoro RNA, dN = 2’-deoxy RNA, N = A, U, G, or C
N#N = phosphorothioate linkage

[0154] It will be understood to those of skill in the art that the base sequence of the first 24 nucleotides of the exemplary crRNAs recited in Table 1 above are directed to a specific target. This 24-nucleotide base sequence may be changed based on the target nucleic acid, however the chemical modifications remain the same. An exemplary unmodified Nme crRNA sequence, from 5′ to 3′, is (N)ₓ GUUGUAGCUCCCUUUCUC (CR42) (SEQ ID NO: 8); or (N)ₓ GUUGUAGCUCCCUUUCUCAUUUCG (CR48) (SEQ ID NO: 9), where “N” corresponds to any nucleotide (e.g., A, U, G, or C) and x corresponds to any integer between 18 and 26. As used herein, “(N)ₓ” corresponds to the guide sequence of a crRNA or sgRNA.

[0155] An exemplary unmodified Nme tracrRNA sequence, from 5′ to 3′, is CGAAAUGAGAACCGUUGCUACAAUAAGGCCGUCUGAAAAGAUGUGCCG CAACGCUCUGCCCCUUAAAGCUUCUGCUUUAAGGGGCAUCGUUUA (TR93) (SEQ ID NO: 10) or AGAACCGUUGCUACAAUAAGGCCGUCUGAAAAGAUGUGCCGCAACGCU CUGCCCCUUAAAGCUCCUGCUUUAAGGGGCAUCGUUUA (TR87) (SEQ ID NO: 11).

[0156] It will be further understood to those of skill in the art that the guide sequence may be 10-30 nucleotides in length, preferably 16-26 nucleotides in length (for example, 16, 17, 18, 19, 20, 21, 22, 23, 24, 25, or 26 nucleotides in length), and is at or near the 5′ terminus of a Cas9 gRNA.

Chemically Modified N. meningitidis Single Guide RNA

[0157] The chemically modified Nme guide RNAs of the disclosure may be in a single guide RNA (sgRNA) format, as described above.

[0158] In certain embodiments, the chemically modified Nme gRNA described above further comprises a nucleotide or non-nucleotide loop or linker linking the 3′ end of the crRNA portion to the 5′ end of the tracrRNA portion.

[0159] In certain embodiments, the nucleotide loop is chemically modified. In certain embodiments, the nucleotide loop comprises the nucleotide sequence of GAAA. In certain embodiments, the nucleotide loop comprises the nucleotide sequence of (mG)(mA)(mA)(mA), wherein mN corresponds to a 2′-O-methyl RNA and N corresponds to any nucleotide.

[0160] In certain embodiments, the non-nucleotide linker comprises an azide linker, an ethylene glycol oligomer, a tetrazine linker, an alkyl chain, a peptide, an amide, or a carbamate (see, e.g., Pils et al. Nucleic Acids Res. 28(9): 1859-1863 (2000)).

[0161] In one aspect, the disclosure provides a chemically modified Neisseria meningitidis (Nme) single guide RNA (sgRNA) comprising one or more chemical modifications.

[0162] In certain embodiments, the sgRNA is between 99 and 145 nucleotides in length. In certain embodiments, the sgRNA is 145 nucleotides in length, 121 nucleotides in length, 111 nucleotides in length, 107 nucleotides in length, 105 nucleotides in length, 103 nucleotides in length, 102 nucleotides in length, 101 nucleotides in length, 100 nucleotides in length, or 99 nucleotides in length.

[0163] In certain embodiments, the chemically modified Nme sgRNA comprises between 2 and 100 modified nucleotides.

[0164] In certain embodiments, the chemically modified Nme sgRNA comprises at least one chemical modification in the nucleotide sequence of any one of:

(SEQ ID NO: 97)
(N)ₓGUUGUAGCUCCCUUUCUCAUUUCGGAAACGAAAUGA
GAACCGUUGCUACAAUAAGGCCGUCUGAAAAGAUGUGCCGCAACGCUC
UGCCCCUUAAAGCUUCUGCUUUAAGGGGCAUCGUUUA (SG-145NT);
(SEQ ID NO: 98)
(N)ₓGUUGUAGCUCCCGAAACGUUGCUACAAUAAGGCCGU
CUGAAAAGAUGUGCCGCAACGCUCUGCCCCUUAAAGCUUCUGCUUUAAG
GGGCAUCGUU (SG-121NTv1);
(SEQ ID NO: 99)
(N)ₓGUUGUAGCUCCCGAAACGUUGCUAC AAUAAGGCCGU
CUGAAAAGAUGUGCCGCAACGCUCUGCCCCUUAAAGCUUCUGCUUUAAG
GGGCAUCGUUUA (SG-121NTv2);
(SEQ ID NO: 100)
(N)ₓGUUGUAGCUCCCGAAACGUUGCUACAAUAAGGCCGU
CUGAAAAGAUGUGCCGCAACGCUCUGCCCCUUUUCUAAGGGGCAUCGUU
UA (SG-111NT);
(SEQ ID NO: 101)
(N)ₓGUUGUAGCUCCCGAAACGUUGCUACAAUAAGGCCGU
CUGAAAAGAUGUGCCGCAACGCUCUGCCCCUUUCUAGGGGCAUCGUU
(SG-107NT);
(SEQ ID NO: 102)
(N)ₓGUUGUAGCUCCCGAAACGUUGCUACAAUAAGGCCGU
CUGAAAAGAUGUGCCGCAACGCUCUGCCCCUUCUGGGGCAUCGUU
(SG-105NTv1);
(SEQ ID NO: 103)
(N)ₓGUUGUAGCUCCCGAAACGUUGCUACAAUAAGGCCGU
CUGAAAAGAUGUGCCGCAACGCUCUGCCCCUUUUCUAAGGGGCAU
(SG-105NTv2);
(SEQ ID NO: 104)
(N)ₓGUUGUAGCUCCCGAAACGUUGCUACAAUAAGGCCGU
CUGAAAAGAUGUGCCGCAACGCUCUGCCUUCUGGCAUCGUUUA
(SG-103NTv1);
(SEQ ID NO: 105)
(N)ₓGUUGUAGCUCCCGAAACGUUGCUACAAUAAGGCCGU
CUGAAAAGAUGUGCCGCAACGCUCUGCCCUUCUGGGCAUCGUU
(SG-103NTv2);
(SEQ ID NO: 106)
(N)ₓGUUGUAGCUCCCGAAACGUUGCUACAAUAAGGCCGU
CUGAAAAGAUGUGCCGCAACGCUCUGCUUCUGCAUCGUUUA
(SG-101NTv1);
or
(SEQ ID NO: 107)
(N)ₓGUUGUAGCUCCCGAAACGUUGCUACAAUAAGGCCGU
CUGAAAAGAUGUGCCGCAACGCUCUGCUUCUGCAUCGUU
(SG-99NT),

[0165] wherein N corresponds to any nucleotide and x corresponds to any integer between 18 and 26.

[0166] In another aspect, the disclosure provides a chemically modified Neisseria meningitidis (Nme) single guide RNA (sgRNA) comprising a chemical modification pattern selected from anyone of:

(SEQ ID NO: 108)
(mN)#(mN)#(mN)#(rN)(rN)(rN)(rN)(rN)(rN)(rN)(rN)(rN)(rN)(rN)(rN)
(rN)(rN)(rN)(rN)(rN)(rN)(rN)(rN)(rN)(rG)(rU)(rU)(rG)(rU)(rA)(rG)(rC)(rU)(rC)(rC)
(rC)(mG)(mA)(mA)(mA)(rC)(rG)(rU)(rU)(rG)(rC)(rU)(rA)(rC)(rA)(rA)(rU)(rA)(rA)
(rG)(rG)(rC)(rC)(rG)(rU)(mC)(mU)(mG)(mA)(mA)(mA)(mA)(mG)(rA)(rU)(rG)(rU)
(rG)(rC)(rC)(rG)(rC)(rA)(rA)(rC)(rG)(rC)(rU)(rC)(rU)(rG)(rC)(rC)(mU)(mU)(mC)
(mU)(rG)(rG)(rC)(rA)(rU)(rC)(rG)(rU)#(mU)#(mU)#(mA) (SG-1);
(SEQ ID NO: 109)
(mN)#(mN)#(mN)#(rN)(rN)(rN)(rN)(rN)(rN)(rN)(rN)(rN)(rN)(rN)(rN)
(rN)(rN)(rN)(rN)(rN)(rN)(rN)(rN)(rN)(rG)(rU)(rU)(rG)(rU)(mA)(mG)(mC)(rU)(rC)
(rC)(rC)(mG)(mA)(mA)(mA)(rC)(rG)(rU)(rU)(rG)(rC)(rU)(rA)(rC)(rA)(rA)(rU)(rA)
(rA)(rG)(rG)(mC)(mC)(rG)(mU)(mC)(mU)(mG)(mA)(mA)(mA)(mA)(mG)(rA)(rU)
(rG)(rU)(rG)(rC)(rC)(rG)(rC)(rA)(rA)(rC)(rG)(rC)(mU)(mC)(mU)(mG)(rC)(rC)(mU)
(mU)(mC)(mU)(rG)(rG)(rC)(rA)(rU)(mC)(mG)(mU)#(mU)#(mU)#(mA)
(SG-2);
(SEQ ID NO: 110)
(mN)#(mN)#(mN)#(mN)(mN)(rN)(rN)(rN)(mN)(mN)(mN)(rN)(mN)
(rN)(rN)(rN)(rN)(mN)(rN)(rN)(rN)(mN)(rN)(rN)(mG)(rU)(rU)(rG)(mU)(mA)(mG)
(mC)(rU)(rC)(rC)(rC)(mG)(mA)(mA)(mA)(mC)(rG)(mU)(rU)(mG)(mC)(rU)(mA)
(mC)(rA)(rA)(rU)(rA)(mA)(rG)(mG)(mC)(mC)(mG)(mU)(mC)(mU)(mG)(mA)(mA)
(mA)(mA)(mG)(mA)(mU)(rG)(mU)(mG)(mC)(mC)(mG)(mC)(mA)(mA)(mC)(mG)
(mC)(mU)(mC)(mU)(mG)(mC)(mC)(mU)(mU)(mC)(mU)(rG)(mG)(rC)(mA)(mU)(mC)
(mG)(mU)#(mU)#(mU)#(mA) (SG-3);
(SEQ ID NO: 111)
(mN)#(mN)#(mN)#(mN)(mN)(rN)(rN)(rN)(mN)(mN)(mN)(rN)(mN)
(rN)(rN)(mN)(rN)(mN)(rN)(rN)(rN)(mN)(rN)(rN)(mG)(rU)(rU)(rG)(mU)(mA)(mG)
(mC)(rU)(rC)(rC)(rC)(mG)(mA)(mA)(mA)(mC)(rG)(mU)(rU)(mG)(mC)(rU)(mA)
(mC)(rA)(rA)(rU)(rA)(mA)(rG)(mG)(fC)(mC)(fG)(mU)(fC)(mU)(fG)(mA)(fA)(mA)
(fA)(mG)(fA)(mU)(rG)(mU)(fG)(mC)(fC)(mG)(fC)(mA)(fA)(mC)(fG)(mC)
(fU)(mC)(fU)(mG)(fC)(mC)(fU)(mU)(fC)(mU)(rG)(mG)(rC)(mA)(fU)(mC)(fG)
(mU)#(mU)#(mU)#(mA) (SG-4);
(SEQ ID NO: 112)
(mN)#(mN)#(mN)#(mN)(mN)(rN)(rN)(rN)(mN)(mN)(mN)(rN)(mN)
(rN)(rN)(rN)(rN)(mN)(rN)(rN)(rN)(mN)(rN)(rN)(mG)(rU)(rU)(rG)(mU)(mA)(mG)
(mC)(rU)(rC)(rC)(rC)(mG)(mA)(mA)(mA)(rC)(rG)(rU)(rU)(rG(rC)(rU)(rA)(rC)(rA)
(rA)(rU)(rA)(rA)(rG)(rG)(mC)(mC)(rG)(mU)(mC(mU)(mG)(mA)(mA)(mA)(mA)
(mG)(rA)(rU)(rG)(rU)(rG)(rC)(rC)(rG)(rC)(rA(rA)(rC)(rG)(rC)(mU)(mC)(mU)(mG)(rC)
(rC)(mU)(mU)(mC)(mU)(rG)(rG)(rC)(rA)(rU)(mC)(mG)(mU)#(mU)#(mU)#(mA)
(SG-5);
(SEQ ID NO: 113)
(mN)#(mN)#(mN)#(rN)(mN)(rN)(rN)(rN)(mN)(mN)(rN)(rN)(mN)
(rN)(rN)(rN)(rN)(mN)(rN)(rN)(rN)(mN)(rN)(rN)(mG)(rU)(rU)(rG)(rU)(mA)(mG)
(mC)(rU)(rC)(rC)(rC)(mG)(mA)(mA)(mA)(rC)(rG)(rU)(rU)(rG)(rC)(rU)(rA)(rC)(rA)(rA)
(rU)(rA)(rA)(rG)(rG)(mC)(mC)(rG)(mU)(mC)(mU)(mG)(mA)(mA)(mA)(mA)(mG)
(rA)(rU)(rG)(rU)(rG)(rC)(rC)(rG)(rC)(rA)(rA)(rC)(rG)(rC)(mU)(mC)(mU)(mG)(rC)
(rC)(mU)(mU)(mC)(mU)(rG)(rG)(rC)(rA)(rU)(mC)(mG)(mU)#(mU)#(mU)#(mA)
(SG-6);
(SEQ ID NO: 114)
(mN)#(mN)#(mN)#(rN)(rN)(rN)(rN)(rN)(rN)(rN)(rN)(rN)(rN)(rN)
(rN)(rN)(rN)(mN)(rN)(rN)(rN)(mN)(rN)(rN)(rG)(rU)(rU)(rG)(rU)(mA)(mG)(mC)(rU)
(rC)(rC)(rC)(mG)(mA)(mA)(mA)(rC)(rG)(rU)(rU)(rG)(rC)(rU)(rA)(rC)(rA)(rA)(rU)
(rA)(rA)(rG)(rG)(mC)(mC)(rG)(mU)(mC)(mU)(mG)(mA)(mA)(mA)(mA)(mG)(rA)
(rU)(rG)(rU)(rG)(rC)(rC)(rG)(rC)(rA)(rA)(rC)(rG)(rC)(mU)(mC)(mU)(mG)(rC)(rC)
(mU)(mU)(mC)(mU)(rG)(rG)(rC)(rA)(rU)(mC)(mG)(mU)#(mU)#(mU)#(mA)
(SG-7);
(SEQ ID NO: 115)
(mN)#(mN)#(mN)#(mN)(mN)(mN)(mN)(mN)(mN)(mN)(mN)(mN)
(mN)(mN)(rN)(rN)(rN)(rN)(rN)(rN)(rN)(rN)(rN)(rN)(rG)(rU)(rU)(rG)(rU)(mA)(mG)
(mC)(rU)(rC)(rC)(rC)(mG)(mA)(mA)(mA)(rC)(rG)(rU)(rU)(rG)(rC)(rU)(rA)(rC)
(rA(rA)(rU)(rA)(rA)(rG)(rG)(mC)(mC)(rG)(mU)(mC)(mU)(mG)(mA)(mA)(mA)(mA)
(mG)(rA)(rU)(rG)(rU)(rG)(rC)(rC)(rG)(rC)(rA)(rA)(rC)(rG)(rC)(mU)(mC)(mU)(mG)
(rC)(rC)(mU)(mU)(mC)(mU)(rG)(rG)(rC)(rA)(rU)(mC)(mG)(mU)#(mU)#(mU)#(mA)
(SG-8);
(SEQ ID NO: 116)
(mN)#(mN)#(mN)#(mN)(mN)(mN)(mN)(mN)(mN)(mN)(mN)(mN)
(mN)(mN)(rN)(rN)(rN)(mN)(rN)(rN)(rN)(mN)(rN)(rN)(mG)(rU)(rU)(rG)(mU)(mA)
(mG)(mC)(rU)(rC)(rC)(rC)(mG)(mA)(mA)(mA)(rC)(rG)(rU)(rU)(rG)(rC)(rU)(rA)
(rC)(rA)(rA)(rU)(rA)(rA)(rG)(rG)(mC)(mC)(rG)(mU)(mC)(mU)(mG)(mA)(mA)(mA)
(mA)(mG)(rA)(rU)(rG)(rU)(rG)(rC)(rC)(rG)(rC)(rA)(rA)(rC)(rG)(rC)(mU)(mC)(mU)
(mG)(rC)(rC)(mU)(mU)(mC)(mU)(rG)(rG)(rC)(rA)(rU)(mC)(mG)(mU)#(mU)#(mU)#
(mA) (SG-9);
(SEQ ID NO: 117)
(mN)#(mN)#(mN)#(mN)(mN)(rN)(rN)(rN)(mN)(mN)(mN)(rN)(mN)
(rN)(rN)(rN)(rN)(mN)(rN)(rN)(rN)(mN)(rN)(rN)(mG)(rU)(rU)(rG)(mU)(mA)(mG)
(mC)(rU)(rC)(rC)(rC)(mG)(mA)(mA)(mA)(rC)(rG)(rU)(rU)(rG)(rC)(rU)(rA)(rC)(rA)
(rA)(rU)(rA)(mA)(rG)(mG)(mC)(mC)(mG)(mU)(mC)(mU)(mG)(mA)(mA)(mA)(mA)
(mG)(mA)(mU)(rG)(rU)(mG)(mC)(mC)(rG)(rC)(rA)(rA)(rC)(rG)(rC)(mU)(mC)(mU)
(mG)(rC)(rC)(mU)(mU)(mC)(mU)(rG)(rG)(rC)(rA)(rU)(mC)(mG)(mU)#(mU)#(mU)
#(mA) (SG-10);
(SEQ ID NO: 118)
(mN)#(mN)#(mN)#(mN)(mN)(rN)(rN)(rN)(mN)(mN)(mN)(rN)(mN)
(rN)(rN)(rN)(rN)(mN)(rN)(rN)(rN)(mN)(rN)(rN)(mG)(rU)(rU)(rG)(mU)(mA)(mG)
(mC)(rU)(rC)(rC)(rC)(mG)(mA)(mA)(mA)(rC)(rG)(rU)(rU)(rG)(rC)(rU)(rA)(rC)(rA)
(rA)(rU)(rA)(rA)(rG)(rG)(mC)(mC)(rG)(mU)(mC)(mU)(mG)(mA)(mA)(mA)(mA)
(mG)(rA)(rU)(rG)(rU)(rG)(rC)(rC)(mG)(rC)(mA)(mA)(mC)(mG)(mC)(mU)(mC)(mU)
(mG)(mC)(mC)(mU)(mU)(mC)(mU)(rG)(mG)(rC)(mA)(rU)(mC)(mG)(mU)#(mU)#
(mU)#(mA) (SG-11);
(SEQ ID NO: 119)
(mN)#(mN)#(mN)#(mN)(mN)(rN)(rN)(rN)(mN)(mN)(mN)(rN)(mN)
(rN)(rN)(rN)(rN)(mN)(rN)(rN)(rN)(mN)(rN)(rN)(fG)(rU)(rU)(rG)(fU)(fA)(fG)(fC)
(rU)(rC)(rC)(rC)(mG)(mA)(mA)(mA)(rC)(rG)(rU)(rU)(rG)(rC)(rU)(rA)(rC)(rA)(rA)
(rU)(rA)(rA)(rG)(rG)(fC)(fC)(rG)(fU)(fC)(fU)(mG)(mA)(mA)(mA)(fA)(fG)(rA)(rU)
(rG)(rU)(rG)(rC)(rC)(rG)(rC)(rA)(rA)(rC)(rG)(rC)(mU)(mC)(fU)(fG)(rC)(rC)(mU)
(mU)(mC)(mU)(rG)(rG)(rC)(rA)(rU)(fC)(fG)(fU)#(fU)#(mU)#(mA)
(SG-12);
(SEQ ID NO: 120)
(mN)#(mN)#(mN)#(mN)(mN)(rN)(rN)(rN)(mN)(mN)(mN)(rN)(mN)
(rN)(rN)(rN)(rN)(mN)(rN)(rN)(rN)(mN)(rN)(rN)(fG)(rU)(rU)(rG)(fU)(fA)(fG)(fC)
(rU)(rC)(rC)(rC)(mG)(mA)(mA)(mA)(mC)(rG)(mU)(rU)(fG)(fC)(rU)(fA)(fC)(rA)(rA)
(rU)(rA)(rA)(rG)(rG)(mC)(mC)(rG)(mU)(mC)(mU)(mG)(mA)(mA)(mA)(mA)(mG)
(rA)(rU)(rG)(rU)(rG)(rC)(rC)(rG)(rC)(rA)(rA)(rC)(rG)(rC)(mU)(mC)(mU)(mG)(rC)
(rC)(mU)(mU)(mC)(mU)(rG)(rG)(rC)(rA)(rU)(mC)(mG)(mU)#(mU)#(mU)#(mA)
(SG-13);
(SEQ ID NO: 121)
(mN)#(mN)#(mN)#(mN)(mN)(rN)(rN)(rN)(mN)(mN)(mN)(rN)(mN)
(rN)(rN)(rN)(rN)(mN)(rN)(rN)(rN)(mN)(rN)(rN)(fG)(rU)(rU)(rG)(fU)(fA)(fG)(fC)
(rU)(rC)(rC)(rC)(mG)(mA)(mA)(mA)(mC)(rG)(mU)(rU)(fG)(fC)(rU)(fA)(fC)(rA)(rA)
(rU)(rA)(rA)(rG)(rG)(fC)(fC)(rG)(fU)(fC)(fU)(mG)(mA)(mA)(mA)(fA)(fG)(rA)(rU)
(rG)(rU)(rG)(rC)(rC)(rG)(rC)(rA)(rA)(rC)(rG)(rC)(mU)(mC)(fU)(fG)(rC)(rC)(mU)
(mU)(mC)(mU)(rG)(rG)(rC)(rA)(rU)(fC)(fG)(fU)#(fU)#(mU)#(mA)
(SG-14);
(SEQ ID NO: 122)
mN#mN#mN#rNrNrNrNrNrNrNrNrNrNrNrNrNrNrNrNrNrNrNrNr
NrGrUrUrGrUrArGrCrUrCrCrCrGrArArArCrGrUrUrGrCrUrArCrArArUrArArGrGr
CrCrGrUrCrUrGrArArArArGrArUrGrUrGrCrCrGrCrArArCrGrCrUrCrUrGrCrCrCr
CrUrUrArArArGrCrUrCrCrUrGrCrUrUrUrArArGrGrGrGrCrArUrCrGrUmU#mU#
mA (SG121-0);
(SEQ ID NO: 123)
mN#mN#mN#mNmNrNrNrNrNrNrNrNrNrNrNrNrNrNrNrNrNrNr
NrNrGrUrUrGrUrArGrCrUrCrCrCmGmAmAmArCrGrUrUrGrCrUrArCrArArUrAr
ArGrGrCrCrGmUmCmUmGmAmAmAmAmGrArUrGrUrGrCrCrGrCrArArCrGrCr
UrCrUrGrCrCmCmCmUmUmAmAmAmGmCmUmCmCmUmGmCmUmUmUmA
mAmGmGrGrGrCrArUmCmGmU#mU#mU#mA (SG121-2);
(SEQ ID NO: 124)
mN#mN#mN#mNmNrNrNrNmNmNmNrNmNrNrNrNrNmNrNrNr
NmNrNrNmGrUrUrGmUmAmGmCrUrCrCrCmGmAmAmArCrGrUrUrGrCrUrArC
rArArUrArArGrGrCrCrGmUmCmUmGmAmAmAmAmGrArUrGrUrGrCrCrGrCrAr
ArCrGrCrUrCrUrGrCrCmCmCmUmUmAmAmAmGmCmUmCmCmUmGmCmUm
UmUmAmAmGmGrGrGrCrArUmCmGmU#mU#mU#mA
(SG121-3);
and
(SEQ ID NO: 125)
mN#mN#mN#mNmNmNmNmNmNmNmNmNmNmNrNrNrNmNr
NrNrNmNrNrNmGrUrUrGmUmAmGmCrUrCrCrCmGmAmAmArCrGrUrUrGrCrU
rArCrArArUrArArGrGrCrCrGmUmCmUmGmAmAmAmAmGrArUrGrUrGrCrCrGr
CrArArCrGrCrUrCrUrGrCrCmCmCmUmUmAmAmAmGmCmUmCmCmUmGmC
mUmUmUmAmAmGmGrGrGrCrArUmCmGmU#mU#mU#mA
(SG121-4),

[0167] wherein rN=RNA, mN=2′-O-methyl RNA, fN=2′-fluoro RNA, N #N=phosphorothioate linkage, and N=any nucleotide.

### Guide RNA Conjugates

[0168] The chemically modified Nme guide RNAs of the disclosure may be modified with terminally conjugated moieties. As used herein, a “terminally conjugated moiety” or “moiety” refers to a compound which may be linked or attached to the 5′ and/or 3′ end of the crRNA and/or tracrRNA of a guide RNA. Terminally conjugated moieties can provide increased stability, increased ability to penetrate cell membranes, increase cellular uptake, increase circulation time in vivo, act as a cell-specific directing reagent, and/or provide a means to monitor cellular or tissue-specific uptake.

[0169] In certain embodiments, the terminally conjugated moiety is conjugated to the 5′ end of the crRNA portion of a guide RNA. In certain embodiments, the terminally conjugated moiety is conjugated to the 3′ end of the crRNA portion of a guide RNA. In certain embodiments, the terminally conjugated moiety is conjugated to the 5′ end of the tracrRNA portion of a guide RNA. In certain embodiments, the terminally conjugated moiety is conjugated to the 3′ end of the tracrRNA portion of a guide RNA.

[0170] In certain exemplary embodiments, a terminally conjugated moiety includes, but is not limited to, fatty acid, steroid, secosteroid, lipid, ganglioside analog, nucleoside analogs, endocannabinoid, vitamin, receptor ligand, peptide, aptamer, alkyl chain, fluorophore, antibody, nuclear localization signal, and the like.

[0171] In certain exemplary embodiments, a terminally conjugated moiety includes, but is not limited to, cholesterol, cholesterol-triethylene glycol (TEGChol), docosahexaenoic acid (DHA), docosanoic acid (DCA), lithocholic acid (LA), GalNAc, amphiphilic block copolymer (ABC), hydrophilic block copolymer (HBC), poloxamer, Cy5, Cy3, and the like.

[0172] In certain exemplary embodiments, the at least one terminally conjugated moiety is a modified lipid, including a branched lipid (such as the structure shown in Formula I) or a headgroup-modified lipid (such as the structure shown in Formula II).

X-MC(═Y)M-Z[L-MC(═Y)M-R]n Formula I:

where X is a moiety that links the lipid to the guide RNA, each Y is independently oxygen or sulfur, each M is independently CH₂, NH, O or S, Z is a branching group which allows two or three (“n”) chains to be joined to the rest of the structure, L is an optional linker moiety, and each R is independently a saturated, monounsaturated or polyunsaturated linear or branched moiety from 2 to 30 atoms in length, a sterol, or other hydrophobic group.

X-MC(═Y)M-Z-[L-MC(═Y)M-R]n-L-K-J Formula II:

where X is a moiety that links the lipid to the guide RNA, each Y is independently oxygen or sulfur, each M is independently CH₂, NH, N-alkyl, O or S, Z is a branching group which allows two or three (“n”) chains to be joined to the rest of the structure, each L is independently an optional linker moiety, and R is a saturated, monounsaturated or polyunsaturated linear or branched moiety from 2 to 30 atoms in length, a sterol, or other hydrophobic group, K is a phosphate, sulfate, or amide and J is an aminoalkane or quaternary aminoalkane group.

[0173] The moieties may be attached to the terminal nucleotides of the guide RNA via a linker. Exemplary linkers include, but are not limited to, an ethylene glycol chain, an alkyl chain, a polypeptide, a polysaccharide, a block copolymer, and the like.

[0174] In certain embodiments, the moiety is conjugated to the 5′ end and/or 3′ end of any one of the crRNAs recited in Table 1.

[0175] In certain embodiments, the moiety is conjugated to the 5′ end and/or 3′ end of any one of tracrRNAs recited in Table 2.

[0176] In certain embodiments, the moiety is conjugated to the 5′ end and/or 3′ end of any one of sgRNA SG-1 to SG-14 (i.e., SG-1, SG-2, SG-3, SG-4, SG-5, SG-6, SG-7, SG-8, SG-9, SG-10, SG-11, SG-12, SG-13, or SG-14).

[0177] In certain embodiments, the moiety is conjugated to the 5′ end and/or 3′ end of any one of sgRNA SG121-0, SG121-2, SG121-3, or SG121-4.

N. meningitidis Cas9 RNA-Guided Nucleases

[0178] N. meningitidis RNA-guided nucleases (e.g., Nme Cas9 or NmCas9) according to the present disclosure include, without limitation, any Cas9 nuclease obtained from N. meningitidis (e.g., Nme1Cas9, Nme2Cas9, or Nme3Cas9), as well as other Cas9 nucleases derived or obtained therefrom. In functional terms, N. meningitidis RNA-guided nucleases are defined as those nucleases that: (a) interact with (e.g., complex with) a gRNA; and (b) together with the gRNA, associate with, and optionally cleave or modify, a target region of a DNA that includes (i) a sequence complementary to the targeting domain of the gRNA and, optionally, (ii) an additional sequence referred to as a “protospacer adjacent motif,” or “PAM,” which is described in greater detail below. As the following examples will illustrate, RNA-guided nucleases can be defined, in broad terms, by their PAM specificity and cleavage activity, even though variations may exist between individual RNA-guided nucleases that share the same PAM specificity or cleavage activity. Skilled artisans will appreciate that some aspects of the present disclosure relate to systems, methods and compositions that can be implemented using any suitable RNA-guided nuclease having a certain PAM specificity and/or cleavage activity. For this reason, unless otherwise specified, the term RNA-guided nuclease should be understood as a generic term, and not limited to any particular type (e.g., Nme1Cas9, Nme2Cas9, or Nme3Cas9), or variation (e.g., full-length vs. truncated or split; naturally-occurring PAM specificity vs. engineered PAM specificity).

[0179] N. meningitidis Cas9 nucleases belong to the Type II-C Cas9 nucleases, which are generally less than 1,100 amino acids in length and are capable of genome editing, including genome editing in mammalian cells.

[0180] In certain embodiments, the chemically modified Nme gRNAs of the disclosure are capable of binding to an Nme Cas9 nuclease or a variant thereof.

[0181] In certain embodiments, the Nme Cas9 nuclease is Nme1Cas9, Nme2Cas9, or Nme3Cas9.

[0182] Exemplary Nme Cas9 amino acid and nucleic acid sequences are recited below in Table 3.

TABLE 3
Exemplary Nme Cas9 amino acid and nucleic acid sequences

| Description | Sequence |
|---|---|
| Nme1Cas9 | AAFKPNSINYILGLDIGIASVGWAMVEIDEEENPIRLIDLGVRV |
| Amino Acid | FERAEVPKTGDSLAMARRLARSVRRLTRRRAHRLLRTRRLLK |
| | REGVLQAANFDENGLIKSLPNTPWQLRAAALDRKLTPLEWS |
| | AVLLHLIKHRGYLSQRKNEGETADKELGALLKGVAGNAHAL |
| | QTGDFRTPAELALNKFEKESGHIRNQRSDYSHTFSRKDLQAE |
| | LILLFEKQKEFGNPHVSGGLKEGIETLLMTQRPALSGDAVQK |
| | MLGHCTFEPAEPKAAKNTYTAERFIWLTKLNNLRILEQGSER |
| | PLTDTERATLMDEPYRKSKLTYAQARKLLGLEDTAFFKGLRY |
| | GKDNAEASTLMEMKAYHAISRALEKEGLKDKKSPLNLSPEL |
| | QDEIGTAFSLFKTDEDITGRLKDRIQPEILEALLKHISFDKFVQI |
| | SLKALRRIVPLMEQGKRYDEACAEIYGDHYGKKNTEEKIYLP |
| | PIPADEIRNPVVLRALSQARKVINGVVRRYGSPARIHIETAREV |
| | GKSFKDRKEIEKRQEENRKDREKAAAKFREYFPNFVGEPKSK |
| | DILKLRLYEQQHGKCLYSGKEINLGRLNEKGYVEIDHALPFSR |
| | TWDDSFNNKVLVLGSENQNKGNQTPYEYFNGKDNSREWQE |
| | FKARVETSRFPRSKKQRILLQKFDEDGFKERNLNDTRYVNRF |
| | LCQFVADRMRLTGKGKKRVFASNGQITNLLRGFWGLRKVRA |
| | ENDRHHALDAVVVACSTVAMQQKITRFVRYKEMNAFDGKTI |
| | DKETGEVLHQKTHFPQPWEFFAQEVMIRVFGKPDGKPEFEEA |
| | DTLEKLRTLLAEKLSSRPEAVHEYVTPLFVSRAPNRKMSGQG |
| | HMETVKSAKRLDEGVSVLRVPLTQLKLKDLEKMVNREREPK |
| | LYEALKARLEAHKDDPAKAFAEPFYKYDKAGNRTQQVKAV |
| | RVEQVQKTGVWVRNHNGIADNATMVRVDVFEKGDKYYLV |
| | PIYSWQVAKGILPDRAVVQGKDEEDWQLIDDSFNFKFSLHPN |
| | DLVEVITKKARMFGYFASCHRGTGNINIRIHDLDHKIGKNGIL |
| | EGIGVKTALSFQKYQIDELGKEIRPCRLKKRPPVR (SEQ ID NO: |
| | 1) |
| Nme2Cas9 | AAFKPNPINYILGLDIGIASVGWAMVEIDEEENPIRLIDLGVRV |
| Amino Acid | FERAEVPKTGDSLAMARRLARSVRRLTRRRAHRLLRARRLL |
| | KREGVLQAADFDENGLIKSLPNTPWQLRAAALDRKLTPLEW |
| | SAVLLHLIKHRGYLSQRKNEGETADKELGALLKGVANNAHA |
| | LQTGDFRTPAELALNKFEKESGHIRNQRGDYSHTFSRKDLQA |
| | ELILLFEKQKEFGNPHVSGGLKEGIETLLMTQRPALSGDAVQ |
| | KMLGHCTFEPAEPKAAKNTYTAERFIWLTKLNNLRILEQGSE |
| | RPLTDTERATLMDEPYRKSKLTYAQARKLLGLEDTAFFKGLR |
| | YGKDNAEASTLMEMKAYHAISRALEKEGLKDKKSPLNLSSE |
| | LQDEIGTAFSLFKTDEDITGRLKDRVQPEILEALLKHISFDKFV |
| | QISLKALRRIVPLMEQGKRYDEACAEIYGDHYGKKNTEEKIY |
| | LPPIPADEIRNPVVLRALSQARKVINGVVRRYGSPARIHIETAR |
| | EVGKSFKDRKEIEKRQEENRKDREKAAAKFREYFPNFVGEPK |
| | SKDILKLRLYEQQHGKCLYSGKEINLVRLNEKGYVEIDHALP |
| | FSRTWDDSFNNKVLVLGSENQNKGNQTPYEYFNGKDNSRE |
| | WQEFKARVETSRFPRSKKQRILLQKFDEDGFKECNLNDTRYV |
| | NRFLCQFVADHILLTGKGKRRVFASNGQITNLLRGFWGLRKV |
| | RAENDRHHALDAVVVACSTVAMQQKITRFVRYKEMNAFDG |
| | KTIDKETGKVLHQKTHFPQPWEFFAQEVMIRVFGKPDGKPEF |
| | EEADTPEKLRTLLAEKLSSRPEAVHEYVTPLFVSRAPNRKMS |
| | GAHKDTLRSAKRFVKHNEKISVKRVWLTEIKLADLENMVNY |
| | KNGREIELYEALKARLEAYGGNAKQAFDPKDNPFYKKGGQL |
| | VKAVRVEKTQESGVLLNKKNAYTIADNGDMVRVDVFCKVD |
| | KKGKNQYFIVPIYAWQVAENILPDIDCKGYRIDDSYTFCFSLH |
| | KYDLIAFQKDEKSKVEFAYYINCDSSNGRFYLAWHDKGSKE |
| | QQFRISTQNLVLIQKYQVNELGKEIRPCRLKKRPPVR (SEQ ID |
| | NO: 2) |
| Nme3Cas9 | AAFKPNPINYILGLDIGIASVGWAMVEIDEEENPIRLIDLGVRV |
| Amino Acid | FERAEVPKTGDSLAMARRLARSVRRLTRRRAHRLLRARRLL |
| | KREGVLQAADFDENGLIKSLPNTPWQLRAAALDRKLTPLEW |
| | SAVLLHLIKHRGYLSQRKNEGETADKELGALLKGVADNAHA |
| | LQTGDFRTPAELALNKFEKECGHIRNQRGDYSHTFSRKDLQA |
| | ELNLLFEKQKEFGNPHVSGGLKEGIETLLMTQRPALSGDAVQ |
| | KMLGHCTFEPAEPKAAKNTYTAERFIWLTKLNNLRILEQGSE |
| | RPLTDTERATLMDEPYRKSKLTYAQARKLLSLEDTAFFKGLR |
| | YGKDNAEASTLMEMKAYHTISRALEKEGLKDKKSPLNLSPEL |
| | QDEIGTAFSLFKTDEDITGRLKDRIQPEILEALLKHISFDKFVQI |
| | SLKALRRIVPLMEQGKRYDEACAEIYGDHYGKKNTEEKIYLP |
| | PIPADEIRNPVVLRALSQARKVINGVVRRYGSPARIHIETAREV |
| | GKSFKDRKEIEKRQEENRKDREKAAAKFREYFPNFVGEPKSK |
| | DILKLRLYEQQHGKCLYSGKEINLGRLNEKGYVEIDHALPFSR |
| | TWDDSFNNKVLVLGSENQNKGNQTPYEYFNGKDNSREWQE |
| | FKARVETSRFPRSKKQRILLQKFDEDGFKERNLNDTRYVNRF |
| | LCQFVADRMRLTGKGKKRVFASNGQITNLLRGFWGLRKVRA |
| | ENDRHHALDAVVVACSTVAMQQKITRFVRYKEMNAFDGKTI |
| | DKETGEVLHQKTHFPQPWEFFAQEVMIRVFGKPDGKPEFEEA |
| | DTPEKLRTLLAEKLSSRPEAVHEYVTPLFVSRAPNRKMSGQG |
| | HMETVKSAKRLDEGVSVLRVPLTQLKLKDLEKMVNREREPK |
| | LYEALKARLEAHKDDPAKAFAEPFYKYDKAGNRTQQVKAV |
| | RVEQVQKTGVWVRNHNGIADNATMVRVDVFEKGDKYYLV |
| | PIYSWQVAKGILPDRAVVAYADEEDWTVIDESFRFKFVLYSN |
| | DLIKVQLKKDSFLGYFSGLDRATGAISLREHDLEKSKGKDGM |
| | HRIGVKTALSFQKYQIDEMGKEIRPCRLKKRPPVR (SEQ ID |
| | NO: 3) |
| Nme1Cas9 | ATGGCTGCCTTCAAACCTAATTCAATCAACTACATCCTCGG |
| Nucleic Acid | CCTCGATATCGGCATCGCATCCGTCGGCTGGGCGATGGTA |
| | GAAATTGACGAAGAAGAAAACCCCATCCGCCTGATTGATT |
| | TGGGCGTGCGCGTATTTGAGCGTGCCGAAGTACCGAAAAC |
| | AGGCGACTCCCTTGCCATGGCAAGGCGTTTGGCGCGCAGT |
| | GTTCGCCGCCTGACCCGCCGTCGCGCCCACCGCCTGCTTCG |
| | GACCCGCCGCCTATTGAAACGCGAAGGCGTATTACAAGCC |
| | GCCAATTTTGACGAAAACGGCTTGATTAAATCCTTACCGA |
| | ATACACCATGGCAACTTCGCGCAGCCGCATTAGACCGCAA |
| | ACTGACGCCTTTAGAGTGGTCGGCAGTCTTGTTGCATTTAA |
| | TCAAACATCGCGGCTATTTATCGCAACGGAAAAACGAGGG |
| | CGAAACTGCCGATAAGGAGCTTGGCGCTTTGCTTAAAGGC |
| | GTAGCCGGCAATGCCCATGCCTTACAGACAGGCGATTTCC |
| | GCACACCGGCCGAATTGGCTTTAAATAAATTTGAGAAAGA |
| | AAGCGGCCATATCCGCAATCAGCGCAGCGATTATTCGCAT |
| | ACGTTCAGCCGCAAAGATTTACAGGCGGAGCTGATTTTGC |
| | TGTTTGAAAAACAAAAAGAATTTGGCAATCCGCATGTTTC |
| | AGGCGGCCTTAAAGAAGGTATTGAAACCCTACTGATGACG |
| | CAACGCCCTGCCCTGTCCGGCGATGCCGTTCAAAAAATGT |
| | TGGGGCATTGCACCTTCGAACCGGCAGAGCCGAAAGCCGC |
| | TAAAAACACCTACACAGCCGAACGTTTCATCTGGCTGACC |
| | AAGCTGAACAACCTGCGTATTTTAGAGCAAGGCAGCGAGC |
| | GGCCATTGACCGATACCGAACGCGCCACGCTTATGGACGA |
| | GCCATACAGAAAATCCAAACTGACTTACGCACAAGCCCGT |
| | AAGCTGCTGGGTTTAGAAGATACCGCCTTTTTCAAAGGCTT |
| | GCGCTATGGTAAAGACAATGCCGAAGCCTCAACATTGATG |
| | GAAATGAAGGCCTACCATGCCATCAGCCGTGCACTGGAAA |
| | AAGAAGGATTGAAAGACAAAAAATCCCCATTAAACCTTTC |
| | TCCCGAATTACAAGACGAAATCGGCACGGCATTCTCCCTG |
| | TTCAAAACCGATGAAGACATTACAGGCCGTCTGAAAGACC |
| | GTATACAGCCCGAAATCTTAGAAGCGCTGTTGAAACACAT |
| | CAGCTTCGATAAGTTCGTCCAAATTTCCTTGAAAGCATTGC |
| | GCCGAATTGTGCCTCTAATGGAACAAGGCAAACGTTACGA |
| | TGAAGCCTGCGCCGAAATCTACGGAGACCATTACGGCAAG |
| | AAGAATACGGAAGAAAAGATTTATCTGCCGCCGATTCCCG |
| | CCGACGAAATCCGCAACCCCGTCGTCTTGCGCGCCTTATCT |
| | CAAGCACGTAAGGTCATTAACGGCGTGGTACGCCGTTACG |
| | GCTCCCCAGCTCGTATCCATATTGAAACTGCAAGGGAAGT |
| | AGGTAAATCGTTTAAAGACCGCAAAGAAATTGAGAAACGC |
| | CAAGAAGAAAACCGCAAAGACCGGGAAAAAGCCGCCGCC |
| | AAATTCCGAGAGTATTTCCCCAATTTTGTCGGAGAACCCA |
| | AATCCAAAGATATTCTGAAACTGCGCCTGTACGAGCAACA |
| | ACACGGCAAATGCCTGTATTCGGGCAAAGAAATCAACTTA |
| | GGCCGTCTGAACGAAAAAGGCTATGTCGAAATCGACCATG |
| | CCCTGCCGTTCTCGCGCACATGGGACGACAGTTTCAACAA |
| | TAAAGTACTGGTATTGGGCAGCGAAAACCAAAACAAAGG |
| | CAATCAAACCCCTTACGAATACTTCAACGGCAAAGACAAC |
| | AGCCGCGAATGGCAGGAATTTAAAGCGCGTGTCGAAACCA |
| | GCCGTTTCCCGCGCAGTAAAAAACAACGGATTCTGCTGCA |
| | AAAATTCGATGAAGACGGCTTTAAAGAACGCAATCTGAAC |
| | GACACGCGCTACGTCAACCGTTTCCTGTGTCAATTTGTTGC |
| | CGACCGTATGCGGCTGACAGGTAAAGGCAAGAAACGTGTC |
| | TTTGCATCCAACGGACAAATTACCAATCTGTTGCGCGGCTT |
| | TTGGGGATTGCGCAAAGTGCGTGCGGAAAACGACCGCCAT |
| | CACGCCTTGGACGCCGTCGTCGTTGCCTGCTCGACCGTTGC |
| | CATGCAGCAGAAAATTACCCGTTTTGTACGCTATAAAGAG |
| | ATGAACGCGTTTGACGGTAAAACCATAGACAAAGAAACA |
| | GGAGAAGTGCTGCATCAAAAAACACACTTCCCACAACCTT |
| | GGGAATTTTTCGCACAAGAAGTCATGATTCGCGTCTTCGGC |
| | AAACCGGACGGCAAACCCGAATTCGAAGAAGCCGATACC |
| | CTAGAAAAACTGCGCACGTTGCTTGCCGAAAAATTATCAT |
| | CTCGCCCCGAAGCCGTACACGAATACGTTACGCCACTGTTT |
| | GTTTCACGCGCGCCCAATCGGAAGATGAGCGGGCAAGGGC |
| | ATATGGAGACCGTCAAATCCGCCAAACGACTGGACGAAGG |
| | CGTCAGCGTGTTGCGCGTACCGCTGACACAGTTAAAACTG |
| | AAAGACTTGGAAAAAATGGTCAATCGGGAGCGCGAACCT |
| | AAGCTATACGAAGCACTGAAAGCACGGCTGGAAGCACAT |
| | AAAGACGATCCTGCCAAAGCCTTTGCCGAGCCGTTTTACA |
| | AATACGATAAAGCAGGCAACCGCACCCAACAGGTAAAAG |
| | CCGTACGCGTAGAGCAAGTACAGAAAACCGGCGTATGGGT |
| | GCGCAACCATAACGGTATTGCCGACAACGCAACCATGGTG |
| | CGCGTAGATGTGTTTGAGAAAGGCGACAAGTATTATCTGG |
| | TACCGATTTACAGTTGGCAGGTAGCGAAAGGGATTTTGCC |
| | GGATAGGGCTGTTGTACAAGGAAAAGATGAAGAAGATTG |
| | GCAACTTATTGATGATAGTTTCAACTTTAAATTCTCATTAC |
| | ACCCTAATGATTTAGTCGAGGTTATAACAAAAAAAGCTAG |
| | AATGTTTGGTTACTTTGCCAGCTGCCATCGAGGCACAGGTA |
| | ATATCAATATACGCATTCATGATCTTGATCATAAAATTGGC |
| | AAAAATGGAATACTGGAAGGTATCGGCGTCAAAACCGCCC |
| | TTTCATTCCAAAAATACCAAATTGACGAACTGGGCAAAGA |
| | AATCAGACCATGCCGTCTGAAAAAACGCCCGCCTGTCCGT |
| | TAA (SEQ ID NO: 4) |
| Nme2Cas9 | ATGGCCGCCTTCAAGCCTAACCCAATCAATTACATCCTGG |
| Nucleic Acid | GACTGGACATCGGAATCGCATCCGTGGGATGGGCTATGGT |
| Bacterial | GGAGATCGACGAGGAGGAGAATCCTATCCGGCTGATCGAT |
| Expression | CTGGGCGTGAGAGTGTTTGAGAGGGCCGAGGTGCCAAAGA |
| | CCGGCGATTCTCTGGCTATGGCCCGGAGACTGGCACGGAG |
| | CGTGAGGCGCCTGACACGGAGAAGGGCACACAGGCTGCT |
| | GAGGGCACGCCGGCTGCTGAAGAGAGAGGGCGTGCTGCA |
| | GGCAGCAGACTTCGATGAGAATGGCCTGATCAAGAGCCTG |
| | CCAAACACCCCCTGGCAGCTGAGAGCAGCCGCCCTGGACA |
| | GGAAGCTGACACCACTGGAGTGGTCTGCCGTGCTGCTGCA |
| | CCTGATCAAGCACCGCGGCTACCTGAGCCAGCGGAAGAAC |
| | GAGGGAGAGACAGCAGACAAGGAGCTGGGCGCCCTGCTG |
| | AAGGGAGTGGCCAACAATGCCCACGCCCTGCAGACCGGCG |
| | ATTTCAGGACACCTGCCGAGCTGGCCCTGAATAAGTTTGA |
| | GAAGGAGTCCGGCCACATCAGAAACCAGAGGGGCGACTA |
| | TAGCCACACCTTCTCCCGCAAGGATCTGCAGGCCGAGCTG |
| | ATCCTGCTGTTCGAGAAGCAGAAGGAGTTTGGCAATCCAC |
| | ACGTGAGCGGAGGCCTGAAGGAGGGAATCGAGACCCTGC |
| | TGATGACACAGAGGCCTGCCCTGTCCGGCGACGCAGTGCA |
| | GAAGATGCTGGGACACTGCACCTTCGAGCCTGCAGAGCCA |
| | AAGGCCGCCAAGAACACCTACACAGCCGAGCGGTTTATCT |
| | GGCTGACAAAGCTGAACAATCTGAGAATCCTGGAGCAGGG |
| | ATCCGAGAGGCCACTGACCGACACAGAGAGGGCCACCCTG |
| | ATGGATGAGCCTTACCGGAAGTCTAAGCTGACATATGCCC |
| | AGGCCAGAAAGCTGCTGGGCCTGGAGGACACCGCCTTCTT |
| | TAAGGGCCTGAGATACGGCAAGGATAATGCCGAGGCCTCC |
| | ACACTGATGGAGATGAAGGCCTATCACGCCATCTCTCGCG |
| | CCCTGGAGAAGGAGGGCCTGAAGGACAAGAAGTCCCCCCT |
| | GAACCTGAGCTCCGAGCTGCAGGATGAGATCGGCACCGCC |
| | TTCTCTCTGTTTAAGACCGACGAGGATATCACAGGCCGCCT |
| | GAAGGACAGGGTGCAGCCTGAGATCCTGGAGGCCCTGCTG |
| | AAGCACATCTCTTTCGATAAGTTTGTGCAGATCAGCCTGAA |
| | GGCCCTGAGAAGGATCGTGCCACTGATGGAGCAGGGCAA |
| | GCGGTACGACGAGGCCTGCGCCGAGATCTACGGCGATCAC |
| | TATGGCAAGAAGAACACAGAGGAGAAGATCTATCTGCCCC |
| | CTATCCCTGCCGACGAGATCAGAAATCCTGTGGTGCTGAG |
| | GGCCCTGTCCCAGGCAAGAAAAGTGATCAACGGAGTGGTG |
| | CGCCGGTACGGATCTCCAGCCCGGATCCACATCGAGACCG |
| | CCAGAGAAGTGGGCAAGAGCTTCAAGGACCGGAAGGAGA |
| | TCGAGAAGAGACAGGAGGAGAATCGCAAGGATCGGGAGA |
| | AGGCCGCCGCCAAGTTTAGGGAGTACTTCCCTAACTTTGTG |
| | GGCGAGCCAAAGTCTAAGGACATCCTGAAGCTGCGCCTGT |
| | ACGAGCAGCAGCACGGCAAGTGTCTGTATAGCGGCAAGG |
| | AGATCAATCTGGTGCGGCTGAACGAGAAGGGCTATGTGGA |
| | GATCGATCACGCCCTGCCTTTCTCCAGAACCTGGGACGATT |
| | CTTTTAACAATAAGGTGCTGGTGCTGGGCAGCGAGAACCA |
| | GAATAAGGGCAATCAGACACCATACGAGTATTTCAATGGC |
| | AAGGACAACTCCAGGGAGTGGCAGGAGTTCAAGGCCCGC |
| | GTGGAGACCTCTAGATTTCCCAGGAGCAAGAAGCAGCGGA |
| | TCCTGCTGCAGAAGTTCGACGAGGATGGCTTTAAGGAGTG |
| | CAACCTGAATGACACCAGATACGTGAACCGGTTCCTGTGC |
| | CAGTTTGTGGCCGATCACATCCTGCTGACCGGCAAGGGCA |
| | AGAGAAGGGTGTTCGCCTCTAATGGCCAGATCACAAACCT |
| | GCTGAGGGGATTTTGGGGACTGAGGAAGGTGCGGGCAGA |
| | GAATGACAGACACCACGCACTGGATGCAGTGGTGGTGGCA |
| | TGCAGCACCGTGGCAATGCAGCAGAAGATCACAAGATTCG |
| | TGAGGTATAAGGAGATGAACGCCTTTGACGGCAAGACCAT |
| | CGATAAGGAGACAGGCAAGGTGCTGCACCAGAAGACCCA |
| | CTTCCCCCAGCCTTGGGAGTTCTTTGCCCAGGAAGTGATGA |
| | TCCGGGTGTTCGGCAAGCCAGACGGCAAGCCTGAGTTTGA |
| | GGAGGCCGATACCCCAGAGAAGCTGAGGACACTGCTGGC |
| | AGAGAAGCTGTCTAGCAGGCCAGAGGCAGTGCACGAGTA |
| | CGTGACCCCACTGTTCGTGTCCAGGGCACCCAATCGGAAG |
| | ATGTCTGGCGCCCACAAGGACACACTGAGAAGCGCCAAGA |
| | GGTTTGTGAAGCACAACGAGAAGATCTCCGTGAAGAGAGT |
| | GTGGCTGACCGAGATCAAGCTGGCCGATCTGGAGAACATG |
| | GTGAATTACAAGAACGGCAGGGAGATCGAGCTGTATGAG |
| | GCCCTGAAGGCAAGGCTGGAGGCCTACGGAGGAAATGCC |
| | AAGCAGGCCTTCGACCCAAAGGATAACCCCTTTTATAAGA |
| | AGGGAGGACAGCTGGTGAAGGCCGTGCGGGTGGAGAAGA |
| | CCCAGGAGAGCGGCGTGCTGCTGAATAAGAAGAACGCCTA |
| | CACAATCGCCGACAATGGCGATATGGTGAGAGTGGACGTG |
| | TTCTGTAAGGTGGATAAGAAGGGCAAGAATCAGTACTTTA |
| | TCGTGCCTATCTATGCCTGGCAGGTGGCCGAGAACATCCT |
| | GCCAGACATCGATTGCAAGGGCTACAGAATCGACGATAGC |
| | TATACATTCTGTTTTTCCCTGCACAAGTATGACCTGATCGC |
| | CTTCCAGAAGGATGAGAAGTCCAAGGTGGAGTTTGCCTAC |
| | TATATCAATTGCGACTCCTCTAACGGCAGGTTCTACCTGGC |
| | CTGGCACGATAAGGGCAGCAAGGAGCAGCAGTTTCGCATC |
| | TCCACCCAGAATCTGGTGCTGATCCAGAAGTATCAGGTGA |
| | ACGAGCTGGGCAAGGAGATCAGGCCATGTCGGCTGAAGA |
| | AGCGCCCACCCGTGCGG (SEQ ID NO: 5) |
| Nme2Cas9 | ATGGCCGCCTTCAAGCCTAACCCAATCAATTACATCCTGG |
| Nucleic Acid- | GACTGGACATCGGAATCGCATCCGTGGGATGGGCTATGGT |
| Humanized | GGAGATCGACGAGGAGGAGAATCCTATCCGGCTGATCGAT |
| | CTGGGCGTGAGAGTGTTTGAGAGGGCCGAGGTGCCAAAGA |
| | CCGGCGATTCTCTGGCTATGGCCCGGAGACTGGCACGGAG |
| | CGTGAGGCGCCTGACACGGAGAAGGGCACACAGGCTGCT |
| | GAGGGCACGCCGGCTGCTGAAGAGAGAGGGCGTGCTGCA |
| | GGCAGCAGACTTCGATGAGAATGGCCTGATCAAGAGCCTG |
| | CCAAACACCCCCTGGCAGCTGAGAGCAGCCGCCCTGGACA |
| | GGAAGCTGACACCACTGGAGTGGTCTGCCGTGCTGCTGCA |
| | CCTGATCAAGCACCGCGGCTACCTGAGCCAGCGGAAGAAC |
| | GAGGGAGAGACAGCAGACAAGGAGCTGGGCGCCCTGCTG |
| | AAGGGAGTGGCCAACAATGCCCACGCCCTGCAGACCGGCG |
| | ATTTCAGGACACCTGCCGAGCTGGCCCTGAATAAGTTTGA |
| | GAAGGAGTCCGGCCACATCAGAAACCAGAGGGGCGACTA |
| | TAGCCACACCTTCTCCCGCAAGGATCTGCAGGCCGAGCTG |
| | ATCCTGCTGTTCGAGAAGCAGAAGGAGTTTGGCAATCCAC |
| | ACGTGAGCGGAGGCCTGAAGGAGGGAATCGAGACCCTGC |
| | TGATGACACAGAGGCCTGCCCTGTCCGGCGACGCAGTGCA |
| | GAAGATGCTGGGACACTGCACCTTCGAGCCTGCAGAGCCA |
| | AAGGCCGCCAAGAACACCTACACAGCCGAGCGGTTTATCT |
| | GGCTGACAAAGCTGAACAATCTGAGAATCCTGGAGCAGGG |
| | ATCCGAGAGGCCACTGACCGACACAGAGAGGGCCACCCTG |
| | ATGGATGAGCCTTACCGGAAGTCTAAGCTGACATATGCCC |
| | AGGCCAGAAAGCTGCTGGGCCTGGAGGACACCGCCTTCTT |
| | TAAGGGCCTGAGATACGGCAAGGATAATGCCGAGGCCTCC |
| | ACACTGATGGAGATGAAGGCCTATCACGCCATCTCTCGCG |
| | CCCTGGAGAAGGAGGGCCTGAAGGACAAGAAGTCCCCCCT |
| | GAACCTGAGCTCCGAGCTGCAGGATGAGATCGGCACCGCC |
| | TTCTCTCTGTTTAAGACCGACGAGGATATCACAGGCCGCCT |
| | GAAGGACAGGGTGCAGCCTGAGATCCTGGAGGCCCTGCTG |
| | AAGCACATCTCTTTCGATAAGTTTGTGCAGATCAGCCTGAA |
| | GGCCCTGAGAAGGATCGTGCCACTGATGGAGCAGGGCAA |
| | GCGGTACGACGAGGCCTGCGCCGAGATCTACGGCGATCAC |
| | TATGGCAAGAAGAACACAGAGGAGAAGATCTATCTGCCCC |
| | CTATCCCTGCCGACGAGATCAGAAATCCTGTGGTGCTGAG |
| | GGCCCTGTCCCAGGCAAGAAAAGTGATCAACGGAGTGGTG |
| | CGCCGGTACGGATCTCCAGCCCGGATCCACATCGAGACCG |
| | CCAGAGAAGTGGGCAAGAGCTTCAAGGACCGGAAGGAGA |
| | TCGAGAAGAGACAGGAGGAGAATCGCAAGGATCGGGAGA |
| | AGGCCGCCGCCAAGTTTAGGGAGTACTTCCCTAACTTTGTG |
| | GGCGAGCCAAAGTCTAAGGACATCCTGAAGCTGCGCCTGT |
| | ACGAGCAGCAGCACGGCAAGTGTCTGTATAGCGGCAAGG |
| | AGATCAATCTGGTGCGGCTGAACGAGAAGGGCTATGTGGA |
| | GATCGATCACGCCCTGCCTTTCTCCAGAACCTGGGACGATT |
| | CTTTTAACAATAAGGTGCTGGTGCTGGGCAGCGAGAACCA |
| | GAATAAGGGCAATCAGACACCATACGAGTATTTCAATGGC |
| | AAGGACAACTCCAGGGAGTGGCAGGAGTTCAAGGCCCGC |
| | GTGGAGACCTCTAGATTTCCCAGGAGCAAGAAGCAGCGGA |
| | TCCTGCTGCAGAAGTTCGACGAGGATGGCTTTAAGGAGTG |
| | CAACCTGAATGACACCAGATACGTGAACCGGTTCCTGTGC |
| | CAGTTTGTGGCCGATCACATCCTGCTGACCGGCAAGGGCA |
| | AGAGAAGGGTGTTCGCCTCTAATGGCCAGATCACAAACCT |
| | GCTGAGGGGATTTTGGGGACTGAGGAAGGTGCGGGCAGA |
| | GAATGACAGACACCACGCACTGGATGCAGTGGTGGTGGCA |
| | TGCAGCACCGTGGCAATGCAGCAGAAGATCACAAGATTCG |
| | TGAGGTATAAGGAGATGAACGCCTTTGACGGCAAGACCAT |
| | CGATAAGGAGACAGGCAAGGTGCTGCACCAGAAGACCCA |
| | CTTCCCCCAGCCTTGGGAGTTCTTTGCCCAGGAAGTGATGA |
| | TCCGGGTGTTCGGCAAGCCAGACGGCAAGCCTGAGTTTGA |
| | GGAGGCCGATACCCCAGAGAAGCTGAGGACACTGCTGGC |
| | AGAGAAGCTGTCTAGCAGGCCAGAGGCAGTGCACGAGTA |
| | CGTGACCCCACTGTTCGTGTCCAGGGCACCCAATCGGAAG |
| | ATGTCTGGCGCCCACAAGGACACACTGAGAAGCGCCAAGA |
| | GGTTTGTGAAGCACAACGAGAAGATCTCCGTGAAGAGAGT |
| | GTGGCTGACCGAGATCAAGCTGGCCGATCTGGAGAACATG |
| | GTGAATTACAAGAACGGCAGGGAGATCGAGCTGTATGAG |
| | GCCCTGAAGGCAAGGCTGGAGGCCTACGGAGGAAATGCC |
| | AAGCAGGCCTTCGACCCAAAGGATAACCCCTTTTATAAGA |
| | AGGGAGGACAGCTGGTGAAGGCCGTGCGGGTGGAGAAGA |
| | CCCAGGAGAGCGGCGTGCTGCTGAATAAGAAGAACGCCTA |
| | CACAATCGCCGACAATGGCGATATGGTGAGAGTGGACGTG |
| | TTCTGTAAGGTGGATAAGAAGGGCAAGAATCAGTACTTTA |
| | TCGTGCCTATCTATGCCTGGCAGGTGGCCGAGAACATCCT |
| | GCCAGACATCGATTGCAAGGGCTACAGAATCGACGATAGC |
| | TATACATTCTGTTTTTCCCTGCACAAGTATGACCTGATCGC |
| | CTTCCAGAAGGATGAGAAGTCCAAGGTGGAGTTTGCCTAC |
| | TATATCAATTGCGACTCCTCTAACGGCAGGTTCTACCTGGC |
| | CTGGCACGATAAGGGCAGCAAGGAGCAGCAGTTTCGCATC |
| | TCCACCCAGAATCTGGTGCTGATCCAGAAGTATCAGGTGA |
| | ACGAGCTGGGCAAGGAGATCAGGCCATGTCGGCTGAAGA |
| | AGCGCCCACCCGTGCGG (SEQ ID NO: 6) |
| Nme3Cas9 | ATGGCTGCCTTCAAACCTAATCCAATCAACTACATCCTCGG |
| Nucleic Acid | CCTCGATATCGGCATCGCATCCGTCGGCTGGGCGATGGTA |
| Bacterial | GAAATTGACGAAGAAGAAAACCCCATCCGCCTGATTGATT |
| Expression | TGGGCGTGCGCGTATTTGAGCGTGCCGAAGTACCGAAAAC |
| | AGGCGACTCCCTTGCCATGGCAAGGCGTTTGGCGCGCAGT |
| | GTCCGCCGCCTGACCCGCCGTCGCGCCCATCGCCTGCTTCG |
| | GGCCCGCCGCCTATTGAAACGCGAAGGCGTATTACAAGCC |
| | GCTGATTTTGACGAAAACGGCTTGATCAAATCCTTACCGA |
| | ATACACCATGGCAACTTCGCGCAGCCGCATTAGACCGCAA |
| | ACTGACGCCTTTAGAGTGGTCGGCAGTCTTATTGCATTTAA |
| | TCAAACACCGCGGTTATTTGTCGCAAAGAAAAAACGAGGG |
| | CGAAACTGCCGATAAAGAGCTTGGCGCTTTGCTCAAAGGC |
| | GTAGCCGACAATGCCCATGCCTTACAGACAGGCGATTTCC |
| | GCACACCGGCCGAATTGGCTTTAAATAAATTTGAGAAAGA |
| | ATGCGGCCATATCCGCAACCAACGCGGCGATTATTCGCAT |
| | ACGTTCAGCCGCAAAGATTTGCAGGCGGAGCTGAATTTAC |
| | TGTTTGAAAAACAAAAAGAATTCGGCAATCCGCATGTTTC |
| | AGGCGGCCTTAAAGAAGGTATTGAAACCCTACTGATGACG |
| | CAACGCCCTGCCCTGTCCGGCGATGCCGTTCAAAAAATGT |
| | TGGGGCATTGCACCTTCGAACCGGCAGAGCCGAAAGCCGC |
| | TAAAAACACCTACACAGCCGAACGTTTCATCTGGCTGACC |
| | AAGCTGAACAACCTGCGTATTTTAGAGCAAGGCAGCGAGC |
| | GGCCATTGACCGATACCGAACGCGCCACGCTTATGGACGA |
| | GCCATACAGAAAATCCAAACTGACTTACGCACAAGCCCGT |
| | AAGCTGCTGAGTTTAGAAGATACCGCCTTTTTCAAAGGCTT |
| | GCGCTATGGTAAAGACAATGCCGAAGCCTCAACATTGATG |
| | GAAATGAAGGCCTACCATACCATCAGCCGTGCACTGGAAA |
| | AAGAAGGATTGAAAGACAAAAAATCCCCATTAAACCTTTC |
| | TCCCGAATTACAAGACGAAATCGGCACGGCATTCTCCCTG |
| | TTCAAAACCGATGAAGACATTACAGGCCGTCTGAAAGACC |
| | GTATACAGCCCGAAATCTTAGAAGCGCTGTTGAAACACAT |
| | CAGCTTCGATAAGTTCGTCCAAATTTCCTTGAAAGCATTGC |
| | GCCGAATTGTGCCTCTAATGGAACAAGGCAAACGTTACGA |
| | TGAAGCCTGCGCCGAAATCTACGGAGACCATTACGGCAAG |
| | AAGAATACGGAAGAAAAGATTTATCTGCCGCCGATTCCCG |
| | CCGACGAAATCCGCAACCCCGTCGTCTTGCGCGCCTTATCT |
| | CAAGCACGTAAGGTCATTAACGGCGTGGTACGCCGTTACG |
| | GCTCCCCAGCTCGTATCCATATTGAAACTGCAAGGGAAGT |
| | AGGTAAATCGTTTAAAGACCGCAAAGAAATTGAGAAACGC |
| | CAAGAAGAAAACCGCAAAGACAGGGAAAAAGCCGCCGCC |
| | AAATTCCGAGAGTATTTCCCCAATTTTGTCGGAGAACCCA |
| | AATCCAAAGATATTCTGAAACTGCGCCTGTACGAGCAACA |
| | ACACGGCAAATGCCTGTATTCGGGCAAAGAAATCAACTTA |
| | GGCCGTCTGAACGAAAAAGGCTATGTCGAAATCGACCATG |
| | CCCTGCCGTTCTCGCGCACATGGGACGACAGTTTCAACAA |
| | TAAAGTACTGGTATTGGGCAGCGAAAACCAAAACAAAGG |
| | CAATCAAACCCCTTACGAATACTTCAACGGCAAAGACAAC |
| | AGCCGCGAATGGCAGGAATTTAAAGCGCGTGTCGAAACCA |
| | GCCGTTTCCCGCGCAGTAAAAAACAACGGATTCTGCTGCA |
| | AAAATTCGATGAAGACGGCTTTAAAGAACGCAATCTGAAC |
| | GACACGCGCTACGTCAACCGTTTCCTGTGTCAATTTGTTGC |
| | CGACCGTATGCGGCTGACAGGTAAAGGCAAGAAACGTGTC |
| | TTTGCATCCAACGGACAAATTACCAATCTGTTGCGCGGCTT |
| | TTGGGGATTGCGCAAAGTGCGTGCGGAAAACGACCGCCAT |
| | CACGCCTTGGACGCCGTCGTCGTTGCCTGCTCGACCGTTGC |
| | CATGCAGCAGAAAATTACCCGTTTTGTACGCTATAAAGAG |
| | ATGAACGCGTTTGACGGTAAAACCATAGACAAAGAAACA |
| | GGAGAAGTGCTGCATCAAAAAACACACTTCCCACAACCTT |
| | GGGAATTTTTCGCACAAGAAGTCATGATTCGCGTCTTCGGC |
| | AAACCGGACGGCAAACCCGAATTCGAAGAAGCCGATACC |
| | CCAGAAAAACTGCGCACGTTGCTTGCCGAAAAATTATCAT |
| | CTCGCCCCGAAGCCGTACACGAATACGTTACGCCACTGTTT |
| | GTTTCACGCGCGCCCAATCGGAAGATGAGCGGGCAAGGGC |
| | ATATGGAGACCGTCAAATCCGCCAAACGACTGGACGAAGG |
| | CGTCAGCGTGTTGCGCGTACCGTTAACACAGTTAAAACTG |
| | AAAGACTTGGAAAAAATGGTCAATCGGGAGCGCGAACCT |
| | AAGCTATACGAAGCACTGAAAGCACGGCTGGAAGCACAT |
| | AAAGACGATCCTGCCAAAGCCTTTGCCGAGCCGTTTTACA |
| | AATACGATAAAGCAGGCAACCGCACCCAACAGGTAAAAG |
| | CCGTACGCGTAGAGCAAGTACAGAAAACCGGCGTATGGGT |
| | GCGCAACCATAACGGTATTGCCGACAACGCAACCATGGTG |
| | CGCGTAGATGTGTTTGAGAAAGGCGACAAGTATTATCTGG |
| | TACCGATTTACAGTTGGCAGGTAGCGAAAGGGATTTTGCC |
| | GGATAGGGCTGTTGTTGCTTATGCAGATGAAGAGGACTGG |
| | ACTGTAATAGATGAAAGCTTCAGATTTAAATTTGTACTTTA |
| | TTCGAATGATTTAATTAAAGTTCAACTTAAAAAAGACAGC |
| | TTTTTAGGTTACTTTTCAGGATTAGATCGAGCCACTGGAGC |
| | CATTTCTCTTCGGGAGCATGATTTGGAAAAATCAAAAGGT |
| | AAAGACGGTATGCATCGTATCGGCGTTAAAACCGCCCTTT |
| | CCTTTCAAAAATACCAAATCGACGAAATGGGCAAAGAAAT |
| | CAGACCATGCCGTCTGAAAAAACGCCCGCCTGTCCGTTAA |
| | (SEQ ID NO: 7) |

[0183] In certain embodiments, the chemically modified Nme gRNAs of the disclosure are capable of binding to an Nme Cas9 nuclease or variant thereof comprising an amino acid sequence with at least 80% identity to an amino acid sequence set forth in SEQ ID NO: 1, 2, or 3.

[0184] In certain embodiments, the chemically modified Nme gRNAs of the disclosure are capable of binding to an Nme Cas9 nuclease or variant thereof comprising an amino acid sequence with 80%, 81%, 82%, 83%, 84%, 85%, 86%, 87%, 88%, 89%, 90%, 91%, 92%, 93%, 94%, 95%, 96%, 97%, 98%, 99%, or 100%, identity to an amino acid sequence set forth in SEQ ID NO: 1, 2, or 3.

[0185] In certain embodiments, the crRNA portion of the chemically modified Nme gRNAs of the disclosure bind to an Nme Cas9 nuclease or variant thereof through one or more nucleobases at positions 2, 11, 12, 14, 17, 20, 34, 35, and 36 from the 5′ end of the crRNA portion.

[0186] In certain embodiments, the repeat sequence of the crRNA portion of the chemically modified Nme gRNAs of the disclosure bind to an Nme Cas9 nuclease or variant thereof through one or more nucleobases at positions 10, 11, and 12 from the 5′ end of the repeat sequence of the crRNA portion.

[0187] In certain embodiments, the guide sequence of the crRNA portion of the chemically modified Nme gRNAs of the disclosure bind to an Nme Cas9 nuclease or variant thereof through one or more nucleobases at positions 5, 8, 11, 13, 14, and 23 from the 3′ end of the guide sequence of the crRNA portion.

[0188] Nme Cas9 nucleases are described in further detail in Esvelt et al. (Nat. Methods. 10: 1116-1121. 2013); Hou et al. (PNAS. 110: 15644-15649. 2013); Lee et al. (Mol. Thera. 24: 645-654. 2016); Amrani et al. (Genome Biol. 19: 214. 2018); Edraki et al. (Mol. Cell. 73: 714-726. 2019); U.S. Patent Publication 2014/0349405; U.S. Pat. No. 10,190,106; U.S. Patent Publication 2018/0355331; and U.S. Patent Publication 2019/0338308, each of which is incorporated herein by reference.

[0189] PAM sequences recognized by the Nme Cas9 nucleases of the disclosure may vary depending on Nme Cas9 type (e.g., Nme1Cas9, Nme2Cas9, or Nme3Cas9).

[0190] For example, but in no way limiting, Nme1Cas9 is capable of recognizing any one of PAM sequences N₄GAYW, N₄GYTT, or N₄GTCT, where “Y” corresponds to nucleotides C or T; “R” corresponds to nucleotides A or G; “M” corresponds to nucleotides A or C; “W” corresponds to nucleotides A or T; and “N” corresponds to nucleotides A, T, G, or C (see, Esvelt et al., supra; Hou et al., supra; Lee et al., supra; Amrani et al., supra).

[0191] In certain embodiments, Nme2Cas9 is capable of recognizing a PAM sequence of N₄CC (see, Sun et al., supra; Edraki et al., supra).

[0192] In certain embodiments, Nme3Cas9 is capable of recognizing a PAM sequence of N₄CAAA (see, Edraki et al., supra).

[0193] In certain embodiments, the NmeCas9 further comprises one or more nuclear localization signal (NLS) polypeptides. In certain embodiments, the NLS polypeptide comprises one or both of a nucleoplasmin NLS and an SV40 NLS.

[0194] In certain embodiments, the NmeCas9 is a variant NmeCas9. In certain embodiments, the variant NmeCas9 is a NmeCas9 nickase. In certain embodiments, the variant NmeCas9 comprises one or both of a D16A mutation and a H588A mutation.

[0195] In certain embodiments, the NmeCas9 or variant NmeCas9 is fused to a nucleotide deaminase. In certain embodiments, the nucleotide deaminase is a cytidine deaminase. In certain embodiments, the nucleotide deaminase is an adenosine deaminase. In certain embodiments, NmeCas9 or variant NmeCas9 further comprises a uracil glycosylase inhibitor.

[0196] The RNA-guided nucleases may be combined with the chemically modified guide RNAs of the present disclosure to form a genome-editing system. The RNA-guided nucleases may be combined with the chemically modified guide RNAs to form an RNP complex that may be delivered to a cell where genome-editing is desired. The RNA-guided nucleases may be expressed in a cell where genome-editing is desired with the chemically modified guide RNAs delivered separately. For example, the RNA-guided nucleases may be expressed from a polynucleotide such as a vector or a synthetic mRNA. The vector may be a viral vector, including, but not limited to, an adeno-associated virus (AAV) vector, an adenovirus vector, or a lentivirus (LV) vector.

[0197] It will be readily apparent to those skilled in the art that other suitable modifications and adaptations of the methods described herein may be made using suitable equivalents without departing from the scope of the embodiments disclosed herein. Having now described certain embodiments in detail, the same will be more clearly understood by reference to the following examples, which are included for purposes of illustration only and are not intended to be limiting.

### EXAMPLES

### Example 1—Synthesis of Chemically Modified crRNA and tracrRNA

[0198] crRNAs and tracrRNAs were synthesized at 1 μmole scale on a Dr. Oligo 48 DNA/RNA synthesizer. BTT (0.25 M in acetonitrile, ChemGenes) was used as activator. 0.05 M iodine in pyridine:water (9:1) (TEDIA) was used as oxidizer. DDTT (0.1 M, ChemGenes) was used as sulfurizing agent. 3% TCA in DCM (TEDIA) was used as deblock solution. RNAs were grown on 1000 Å CPG functionalized with Unylinker (˜42 μmol/g). Phosphoramidites (ChemGenes) were dissolved in acetonitrile to 0.15 M; the total contact time during coupling steps was approximately 10 min for each base; the phosphoramidite and activator were delivered in two aliquots during this time. After synthesis, the oligonucleotides were cleaved from solid support and nucleobases were deprotected with a 3:1 NH₄OH:EtOH solution for 48 hours at room temperature. Deprotection of the TBDMS group was achieved with DMSO:NEt3·3HF (4:1) solution (500 μL) at 65° C. for 3 hours. RNA oligonucleotides were then recovered by precipitation in 3M NaOAc (25 μL) and n-BuOH (1 mL), and the pellet was washed with cold 70% EtOH and resuspended in 1 mL RNase-free water.

[0199] Purification of the crRNAs and tracrRNAs were carried out by high performance liquid chromatography using a 1260 infinity system with an Agilent PL-SAX 1000 Å column (150×7.5 mm, 8 μm). Buffer A: 30% acetonitrile in water; Buffer B: 30% acetonitrile in 1M NaClO₄ (aq). Excess salt was removed with a Sephadex Nap-10 column.

[0200] crRNAs and tracrRNAs were analyzed on an Agilent 6530 Q-TOF LC/MS system with electrospray ionization and time of flight ion separation in negative ionization mode. The data were analyzed using Agilent Mass Hunter software. Buffer A: 100 mM hexafluoroisopropanol with 9 mM triethylamine in water; Buffer B: 100 mM hexafluoroisopropanol with 9 mM trimethylamine in methanol.

[0201] The crRNAs used in the Examples are recited below in Table 4. The sgRNAs used in the Examples are recited below in Table 5. Table 2 above recites tracrRNAs used in the Examples.

TABLE 4
Exemplary crRNAs.

| | | SEQ ID |
|---|---|---|
| Name | Sequence | NO: |
| CR42- | (mC)(mU)(mG)(rA)(rA)(rC)(rU)(rU)(rG)(rU)(rG)(rG)(rC)(rC)(rG)(rU)(rU) | 126 |
| 1_MCV | (rU)(rA)(rC)(rG)(rU)(rC)(rG)(rG)(rU)(rU)(rG)(rU)(rA)(rG)(rC)(rU)(rC) | |
| | (rC)(rC)(rU)(mU)(mU)(mC)(mU)(mC) | |
| CR42- | (mC)#(mU)#(mG)#(rA)(rA)(rC)(rU)(rU)(rG)(rU)(rG)(rG)(rC)(rC)(rG) | 127 |
| 2_MCV | (rU)(rU)(rU)(rA)(rC)(rG)(rU)(rC)(rG)(rG)(rU)(rU)(rG)(rU)(rA)(rG)(rC)(rU) | |
| | (rC)(rC)(rC)(rU)(mU)(mU)#(mC)#(mU)#(mC) | |
| CR42- | (mC)#(mU)(mG)(rA)(rA)(rC)(rU)(rU)(rG)(rU)(rG)(rG)(rC)(rC)(rG)(rU) | 128 |
| 3_MCV | (rU)(rU)(rA)(rC)(rG)(rU)(rC)(rG)(rG)(rU)(rU)(rG)(rU)(rA)(rG)(rC)(rU) | |
| | (rC)(rC)(rC)(rU)(mU)(mU)#(mC)#(mU)#(mC) | |
| CR42- | (mC)#(mU)#(mG)#(mA)(mA)(rC)(rU)(rU)(mG)(mU)(mG)(rG)(mC)(rC) | 129 |
| 4_MCV | (rG)(rU)(rU)(mU)(rA)(rC)(rG)(mU)(rC)(rG)(mG)(rU)(rU)(rG)(mU)(mA) | |
| | (mG)(mC)(rU)(rC)(rC)(rC)(rU)(mU)(mU)#(mC)#(mU)#(mC) | |
| CR42- | (mC)#(mU)#(mG)#(mA)(mA)(mC)(rU)(rU)(mG)(mU)(mG)(rG)(mC)(rC) | 130 |
| 5_MCV | (rG)(rU)(rU)(mU)(rA)(rC)(rG)(mU)(rC)(rG)(mG)(rU)(rU)(rG)(mU)(mA) | |
| | (mG)(mC)(rU)(rC)(rC)(rC)(rU)(mU)(mU)#(mC)#(mU)#(mC) | |
| CR42- | (mC)#(mU)#(mG)#(mA)(mA)(rC)(mU)(rU)(mG)(mU)(mG)(rG)(mC)(rC) | 131 |
| 6_MCV | (rG)(rU)(rU)(mU)(rA)(rC)(rG)(mU)(rC)(rG)(mG)(rU)(rU)(rG)(mU)(mA) | |
| | (mG)(mC)(rU)(rC)(rC)(rC)(rU)(mU)(mU)#(mC)#(mU)#(mC) | |
| CR42- | (mC)#(mU)#(mG)#(mA)(mA)(rC)(rU)(mU)(mG)(mU)(mG)(rG)(mC)(rC) | 132 |
| 7_MCV | (rG)(rU)(rU)(mU)(rA)(rC)(rG)(mU)(rC)(rG)(mG)(rU)(rU)(rG)(mU)(mA) | |
| | (mG)(mC)(rU)(rC)(rC)(rC)(rU)(mU)(mU)#(mC)#(mU)#(mC) | |
| CR42- | (mC)#(mU)#(mG)#(mA)(mA)(rC)(rU)(rU)(mG)(mU)(mG)(mG)(mC)(rC) | 133 |
| 8_MCV | (rG)(rU)(rU)(mU)(rA)(rC)(rG)(mU)(rC)(rG)(mG)(rU)(rU)(rG)(mU)(mA) | |
| | (mG)(mC)(rU)(rC)(rC)(rC)(rU)(mU)(mU)#(mC)#(mU)#(mC) | |
| CR42- | (mC)#(mU)#(mG)#(mA)(mA)(rC)(rU)(rU)(mG)(mU)(mG)(rG)(mC)(mC) | 134 |
| 9_MCV | (rG)(rU)(rU)(mU)(rA)(rC)(rG)(mU)(rC)(rG)(mG)(rU)(rU)(rG)(mU)(mA) | |
| | (mG)(mC)(rU)(rC)(rC)(rC)(rU)(mU)(mU)#(mC)#(mU)#(mC) | |
| CR42- | (mC)#(mU)#(mG)#(mA)(mA)(rC)(rU)(rU)(mG)(mU)(mG)(rG)(mC)(rC) | 135 |
| 10_MCV | (mG)(rU)(rU)(mU)(rA)(rC)(rG)(mU)(rC)(rG)(mG)(rU)(rU)(rG)(mU)(mA) | |
| | (mG)(mC)(rU)(rC)(rC)(rC)(rU)(mU)(mU)#(mC)#(mU)#(mC) | |
| CR42- | (mC)#(mU)#(mG)#(mA)(mA)(rC)(rU)(rU)(mG)(mU)(mG)(rG)(mC)(rC) | 136 |
| 11_MCV | (rG)(mU)(rU)(mU)(rA)(rC)(rG)(mU)(rC)(rG)(mG)(rU)(rU)(rG)(mU)(mA) | |
| | (mG)(mC)(rU)(rC)(rC)(rC)(rU)(mU)(mU)#(mC)#(mU)#(mC) | |
| CR42- | (mC)#(mU)#(mG)#(mA)(mA)(rC)(rU)(rU)(mG)(mU)(mG)(rG)(mC)(rC) | 137 |
| 12_MCV | (rG)(rU)(mU)(mU)(rA)(rC)(rG)(mU)(rC)(rG)(mG)(rU)(rU)(rG)(mU)(mA) | |
| | (mG)(mC)(rU)(rC)(rC)(rC)(rU)(mU)(mU)#(mC)#(mU)#(mC) | |
| CR42- | (mC)#(mU)#(mG)#(mA)(mA)(rC)(rU)(rU)(mG)(mU)(mG)(rG)(mC)(rC) | 138 |
| 13_MCV | (rG)(rU)(rU)(mU)(mA)(rC)(rG)(mU)(rC)(rG)(mG)(rU)(rU)(rG)(mU)(mA) | |
| | (mG)(mC)(rU)(rC)(rC)(rC)(rU)(mU)(mU)#(mC)#(mU)#(mC) | |
| CR42- | (mC)#(mU)#(mG)#(mA)(mA)(rC)(rU)(rU)(mG)(mU)(mG)(rG)(mC)(rC) | 139 |
| 14_MCV | (rG)(rU)(rU)(mU)(rA)(mC)(rG)(mU)(rC)(rG)(mG)(rU)(rU)(rG)(mU)(mA) | |
| | (mG)(mC)(rU)(rC)(rC)(rC)(rU)(mU)(mU)#(mC)#(mU)#(mC) | |
| CR42- | (mC)#(mU)#(mG)#(mA)(mA)(rC)(rU)(rU)(mG)(mU)(mG)(rG)(mC)(rC) | 140 |
| 15_MCV | (rG)(rU)(rU)(mU)(rA)(rC)(mG)(mU)(rC)(rG)(mG)(rU)(rU)(rG)(mU)(mA) | |
| | (mG)(mC)(rU)(rC)(rC)(rC)(rU)(mU)(mU)#(mC)#(mU)#(mC) | |
| CR42- | (mC)#(mU)#(mG)#(mA)(mA)(rC)(rU)(rU)(mG)(mU)(mG)(rG)(mC)(rC) | 141 |
| 16_MCV | (rG)(rU)(rU)(mU)(rA)(rC)(rG)(mU)(mC)(rG)(mG)(rU)(rU)(rG)(mU)(mA) | |
| | (mG)(mC)(rU)(rC)(rC)(rC)(rU)(mU)(mU)#(mC)#(mU)#(mC) | |
| CR42- | (mC)#(mU)#(mG)#(mA)(mA)(rC)(rU)(rU)(mG)(mU)(mG)(rG)(mC)(rC) | 142 |
| 17_MCV | (rG)(rU)(rU)(mU)(rA)(rC)(rG)(mU)(rC)(mG)(mG)(rU)(rU)(rG)(mU)(mA) | |
| | (mG)(mC)(rU)(rC)(rC)(rC)(rU)(mU)(mU)#(mC)#(mU)#(mC) | |
| CR42- | (mC)#(mU)#(mG)#(mA)(mA)(rC)(rU)(rU)(mG)(mU)(mG)(rG)(mC)(rC) | 143 |
| 18_MCV | (rG)(rU)(rU)(mU)(rA)(rC)(rG)(mU)(rC)(rG)(mG)(mU)(rU)(rG)(mU)(mA) | |
| | (mG)(mC)(rU)(rC)(rC)(rC)(rU)(mU)(mU)#(mC)#(mU)#(mC) | |
| CR42- | (mC)#(mU)#(mG)#(mA)(mA)(rC)(rU)(rU)(mG)(mU)(mG)(rG)(mC)(rC) | 144 |
| 19_MCV | (rG)(rU)(rU)(mU)(rA)(rC)(rG)(mU)(rC)(rG)(mG)(rU)(mU)(rG)(mU)(mA) | |
| | (mG)(mC)(rU)(rC)(rC)(rC)(rU)(mU)(mU)#(mC)#(mU)#(mC) | |
| CR42- | (mC)#(mU)#(mG)#(mA)(mA)(rC)(rU)(rU)(mG)(mU)(mG)(rG)(mC)(rC) | 145 |
| 20_MCV | (rG)(rU)(rU)(mU)(rA)(rC)(rG)(mU)(rC)(rG)(mG)(rU)(rU)(mG)(mU)(mA) | |
| | (mG)(mC)(rU)(rC)(rC)(rC)(rU)(mU)(mU)#(mC)#(mU)#(mC) | |
| CR42- | (mC)#(mU)#(mG)#(mA)(mA)(rC)(rU)(rU)(mG)(mU)(mG)(rG)(mC)(rC) | 146 |
| 21_MCV | (rG)(rU)(rU)(mU)(rA)(rC)(rG)(mU)(rC)(rG)(mG)(rU)(rU)(rG)(mU)(mA) | |
| | (mG)(mC)(mU)(rC)(rC)(rC)(rU)(mU)(mU)#(mC)#(mU)#(mC) | |
| CR42- | (mC)#(mU)#(mG)#(mA)(mA)(rC)(rU)(rU)(mG)(mU)(mG)(rG)(mC)(rC) | 147 |
| 22_MCV | (rG)(rU)(rU)(mU)(rA)(rC)(rG)(mU)(rC)(rG)(mG)(rU)(rU)(rG)(mU)(mA) | |
| | (mG)(mC)(rU)(mC)(rC)(rC)(rU)(mU)(mU)#(mC)#(mU)#(mC) | |
| CR42- | (mC)#(mU)#(mG)#(mA)(mA)(rC)(rU)(rU)(mG)(mU)(mG)(rG)(mC)(rC) | 148 |
| 23_MCV | (rG)(rU)(rU)(mU)(rA)(rC)(rG)(mU)(rC)(rG)(mG)(rU)(rU)(rG)(mU)(mA) | |
| | (mG)(mC)(rU)(rC)(mC)(rC)(rU)(mU)(mU)#(mC)#(mU)#(mC) | |
| CR42- | (mC)#(mU)#(mG)#(mA)(mA)(rC)(rU)(rU)(mG)(mU)(mG)(rG)(mC)(rC) | 149 |
| 24_MCV | (rG)(rU)(rU)(mU)(rA)(rC)(rG)(mU)(rC)(rG)(mG)(rU)(rU)(rG)(mU)(mA) | |
| | (mG)(mC)(rU)(rC)(rC)(mC)(rU)(mU)(mU)#(mC)#(mU)#(mC) | |
| CR42- | (mC)#(mU)#(mG)#(mA)(mA)(rC)(rU)(rU)(mG)(mU)(mG)(rG)(mC)(rC) | 150 |
| 25_MCV | (rG)(rU)(rU)(mU)(rA)(rC)(rG)(mU)(rC)(rG)(mG)(rU)(rU)(rG)(mU)(mA) | |
| | (mG)(mC)(rU)(rC)(rC)(rC)(mU)(mU)(mU)#(mC)#(mU)#(mC) | |
| CR42- | (mC)#(mU)#(mG)#(mA)(mA)(fC)(rU)(rU)(mG)(mU)(mG)(rG)(mC)(rC) | 151 |
| 26_MCV | (rG)(rU)(rU)(mU)(rA)(rC)(rG)(mU)(rC)(rG)(mG)(rU)(rU)(rG)(mU)(mA) | |
| | (mG)(mC)(rU)(rC)(rC)(rC)(rU)(mU)(mU)#(mC)#(mU)#(mC) | |
| CR42- | (mC)#(mU)#(mG)#(mA)(mA)(rC)(fU)(rU)(mG)(mU)(mG)(rG)(mC)(rC) | 152 |
| 27_MCV | (rG)(rU)(rU)(mU)(rA)(rC)(rG)(mU)(rC)(rG)(mG)(rU)(rU)(rG)(mU)(mA) | |
| | (mG)(mC)(rU)(rC)(rC)(rC)(rU)(mU)(mU)#(mC)#(mU)#(mC) | |
| CR42- | (mC)#(mU)#(mG)#(mA)(mA)(rC)(rU)(fU)(mG)(mU)(mG)(rG)(mC)(rC) | 153 |
| 28_MCV | (rG)(rU)(rU)(mU)(rA)(rC)(rG)(mU)(rC)(rG)(mG)(rU)(rU)(rG)(mU)(mA) | |
| | (mG)(mC)(rU)(rC)(rC)(rC)(rU)(mU)(mU)#(mC)#(mU)#(mC) | |
| CR42- | (mC)#(mU)#(mG)#(mA)(mA)(rC)(rU)(rU)(mG)(mU)(mG)(fG)(mC)(rC) | 154 |
| 29_MCV | (rG)(rU)(rU)(mU)(rA)(rC)(rG)(mU)(rC)(rG)(mG)(rU)(rU)(rG)(mU)(mA) | |
| | (mG)(mC)(rU)(rC)(rC)(rC)(rU)(mU)(mU)#(mC)#(mU)#(mC) | |
| CR42- | (mC)#(mU)#(mG)#(mA)(mA)(rC)(rU)(rU)(mG)(mU)(mG)(rG)(mC)(fC) | 155 |
| 30_MCV | (rG)(rU)(rU)(mU)(rA)(rC)(rG)(mU)(rC)(rG)(mG)(rU)(rU)(rG)(mU)(mA) | |
| | (mG)(mC)(rU)(rC)(rC)(rC)(rU)(mU)(mU)#(mC)#(mU)#(mC) | |
| CR42- | (mC)#(mU)#(mG)#(mA)(mA)(rC)(rU)(rU)(mG)(mU)(mG)(rG)(mC)(rC) | 156 |
| 31_MCV | (fG)(rU)(rU)(mU)(rA)(rC)(rG)(mU)(rC)(rG)(mG)(rU)(rU)(rG)(mU)(mA) | |
| | (mG)(mC)(rU)(rC)(rC)(rC)(rU)(mU)(mU)#(mC)#(mU)#(mC) | |
| CR42- | (mC)#(mU)#(mG)#(mA)(mA)(rC)(rU)(rU)(mG)(mU)(mG)(rG)(mC)(rC) | 157 |
| 32_MCV | (rG)(fU)(rU)(mU)(rA)(rC)(rG)(mU)(rC)(rG)(mG)(rU)(rU)(rG)(mU)(mA) | |
| | (mG)(mC)(rU)(rC)(rC)(rC)(rU)(mU)(mU)#(mC)#(mU)#(mC) | |
| CR42- | (mC)#(mU)#(mG)#(mA)(mA)(rC)(rU)(rU)(mG)(mU)(mG)(rG)(mC)(rC) | 158 |
| 33_MCV | (rG)(rU)(fU)(mU)(rA)(rC)(rG)(mU)(rC)(rG)(mG)(rU)(rU)(rG)(mU)(mA) | |
| | (mG)(mC)(rU)(rC)(rC)(rC)(rU)(mU)(mU)#(mC)#(mU)#(mC) | |
| CR42- | (mC)#(mU)#(mG)#(mA)(mA)(rC)(rU)(rU)(mG)(mU)(mG)(rG)(mC)(rC) | 159 |
| 34_MCV | (rG)(rU)(rU)(mU)(fA)(rC)(rG)(mU)(rC)(rG)(mG)(rU)(rU)(rG)(mU)(mA) | |
| | (mG)(mC)(rU)(rC)(rC)(rC)(rU)(mU)(mU)#(mC)#(mU)#(mC) | |
| CR42- | (mC)#(mU)#(mG)#(mA)(mA)(rC)(rU)(rU)(mG)(mU)(mG)(rG)(mC)(rC) | 160 |
| 35_MCV | (rG)(rU)(rU)(mU)(rA)(fC)(rG)(mU)(rC)(rG)(mG)(rU)(rU)(rG)(mU)(mA) | |
| | (mG)(mC)(rU)(rC)(rC)(rC)(rU)(mU)(mU)#(mC)#(mU)#(mC) | |
| CR42- | (mC)#(mU)#(mG)#(mA)(mA)(rC)(rU)(rU)(mG)(mU)(mG)(rG)(mC)(rC) | 161 |
| 36_MCV | (rG)(rU)(rU)(mU)(rA)(rC)(fG)(mU)(rC)(rG)(mG)(rU)(rU)(rG)(mU)(mA) | |
| | (mG)(mC)(rU)(rC)(rC)(rC)(rU)(mU)(mU)#(mC)#(mU)#(mC) | |
| CR42- | (mC)#(mU)#(mG)#(mA)(mA)(rC)(rU)(rU)(mG)(mU)(mG)(rG)(mC)(rC) | 162 |
| 37_MCV | (rG)(rU)(rU)(mU)(rA)(rC)(rG)(mU)(fC)(rG)(mG)(rU)(rU)(rG)(mU)(mA) | |
| | (mG)(mC)(rU)(rC)(rC)(rC)(rU)(mU)(mU)#(mC)#(mU)#(mC) | |
| CR42- | (mC)#(mU)#(mG)#(mA)(mA)(rC)(rU)(rU)(mG)(mU)(mG)(rG)(mC)(rC) | 163 |
| 38_MCV | (rG)(rU)(rU)(mU)(rA)(rC)(rG)(mU)(rC)(fG)(mG)(rU)(rU)(rG)(mU)(mA) | |
| | (mG)(mC)(rU)(rC)(rC)(rC)(rU)(mU)(mU)#(mC)#(mU)#(mC) | |
| CR42- | (mC)#(mU)#(mG)#(mA)(mA)(rC)(rU)(rU)(mG)(mU)(mG)(rG)(mC)(rC) | 164 |
| 39_MCV | (rG)(rU)(rU)(mU)(rA)(rC)(rG)(mU)(rC)(rG)(mG)(fU)(rU)(rG)(mU)(mA) | |
| | (mG)(mC)(rU)(rC)(rC)(rC)(rU)(mU)(mU)#(mC)#(mU)#(mC) | |
| CR42- | (mC)#(mU)#(mG)#(mA)(mA)(rC)(rU)(rU)(mG)(mU)(mG)(rG)(mC)(rC) | 165 |
| 40_MCV | (rG)(rU)(rU)(mU)(rA)(rC)(rG)(mU)(rC)(rG)(mG)(rU)(fU)(rG)(mU)(mA) | |
| | (mG)(mC)(rU)(rC)(rC)(rC)(rU)(mU)(mU)#(mC)#(mU)#(mC) | |
| CR42- | (mC)#(mU)#(mG)#(mA)(mA)(rC)(rU)(rU)(mG)(mU)(mG)(rG)(mC)(rC) | 166 |
| 41_MCV | (rG)(rU)(rU)(mU)(rA)(rC)(rG)(mU)(rC)(rG)(mG)(rU)(rU)(fG)(mU)(mA) | |
| | (mG)(mC)(rU)(rC)(rC)(rC)(rU)(mU)(mU)#(mC)#(mU)#(mC) | |
| CR42- | (mC)#(mU)#(mG)#(mA)(mA)(rC)(rU)(rU)(mG)(mU)(mG)(rG)(mC)(rC) | 167 |
| 42_MCV | (rG)(rU)(rU)(mU)(rA)(rC)(rG)(mU)(rC)(rG)(mG)(rU)(rU)(rG)(mU)(mA) | |
| | (mG)(mC)(fU)(rC)(rC)(rC)(rU)(mU)(mU)#(mC)#(mU)#(mC) | |
| CR42- | (mC)#(mU)#(mG)#(mA)(mA)(rC)(rU)(rU)(mG)(mU)(mG)(rG)(mC)(rC) | 168 |
| 43_MCV | (rG)(rU)(rU)(mU)(rA)(rC)(rG)(mU)(rC)(rG)(mG)(rU)(rU)(rG)(mU)(mA) | |
| | (mG)(mC)(rU)(fC)(rC)(rC)(rU)(mU)(mU)#(mC)#(mU)#(mC) | |
| CR42- | (mC)#(mU)#(mG)#(mA)(mA)(rC)(rU)(rU)(mG)(mU)(mG)(rG)(mC)(rC) | 169 |
| 44_MCV | (rG)(rU)(rU)(mU)(rA)(rC)(rG)(mU)(rC)(rG)(mG)(rU)(rU)(rG)(mU)(mA) | |
| | (mG)(mC)(rU)(rC)(fC)(rC)(rU)(mU)(mU)#(mC)#(mU)#(mC) | |
| CR42- | (mC)#(mU)#(mG)#(mA)(mA)(rC)(rU)(rU)(mG)(mU)(mG)(rG)(mC)(rC) | 170 |
| 45_MCV | (rG)(rU)(rU)(mU)(rA)(rC)(rG)(mU)(rC)(rG)(mG)(rU)(rU)(rG)(mU)(mA) | |
| | (mG)(mC)(rU)(rC)(rC)(fC)(rU)(mU)(mU)#(mC)#(mU)#(mC) | |
| CR42- | (mC)#(mU)#(mG)#(mA)(mA)(rC)(rU)(rU)(mG)(mU)(mG)(rG)(mC)(rC) | 171 |
| 46_MCV | (rG)(rU)(rU)(mU)(rA)(rC)(rG)(mU)(rC)(rG)(mG)(rU)(rU)(rG)(mU)(mA) | |
| | (mG)(mC)(rU)(rC)(rC)(rC)(fU)(mU)(mU)#(mC)#(mU)#(mC) | |
| CR42- | (mC)#(mU)#(mG)#(mA)(mA)(mC)(mU)(mU)(mG)(mU)(mG)(mG)(mC) | 172 |
| 47_MCV | (mC)(rG)(rU)(rU)(mU)(rA)(rC)(rG)(mU)(rC)(rG)(mG)(rU)(rU)(rG)(mU) | |
| | (mA)(mG)(mC)(rU)(rC)(rC)(rC)(rU)(mU)(mU)#(mC)#(mU)#(mC) | |
| CR42- | (mC)#(mU)#(mG)#(mA)(mA)(fC)(fU)(fU)(mG)(mU)(mG)(mG)(mC)(mC) | 173 |
| 48_MCV | (rG)(rU)(rU)(mU)(rA)(rC)(rG)(mU)(rC)(rG)(mG)(rU)(rU)(rG)(mU)(mA) | |
| | (mG)(mC)(rU)(rC)(rC)(rC)(rU)(mU)(mU)#(mC)#(mU)#(mC) | |
| CR42- | (mC)#(mU)#(mG)#(mA)(mA)(dC)(rU)(rU)(mG)(mU)(mG)(rG)(mC)(rC) | 174 |
| 49_MCV | (rG)(rU)(rU)(mU)(rA)(rC)(rG)(mU)(rC)(rG)(mG)(rU)(rU)(rG)(mU)(mA) | |
| | (mG)(mC)(rU)(rC)(rC)(rC)(rU)(mU)(mU)#(mC)#(mU)#(mC) | |
| CR42- | (mC)#(mU)#(mG)#(mA)(mA)(rC)(dT)(rU)(mG)(mU)(mG)(rG)(mC)(rC) | 175 |
| 50_MCV | (rG)(rU)(rU)(mU)(rA)(rC)(rG)(mU)(rC)(rG)(mG)(rU)(rU)(rG)(mU)(mA) | |
| | (mG)(mC)(rU)(rC)(rC)(rC)(rU)(mU)(mU)#(mC)#(mU)#(mC) | |
| CR42- | (mC)#(mU)#(mG)#(mA)(mA)(rC)(rU)(dT)(mG)(mU)(mG)(rG)(mC)(rC) | 176 |
| 51_MCV | (rG)(rU)(rU)(mU)(rA)(rC)(rG)(mU)(rC)(rG)(mG)(rU)(rU)(rG)(mU)(mA) | |
| | (mG)(mC)(rU)(rC)(rC)(rC)(rU)(mU)(mU)#(mC)#(mU)#(mC) | |
| CR42- | (mC)#(mU)#(mG)#(mA)(mA)(rC)(rU)(rU)(mG)(mU)(mG)(dG)(mC)(rC) | 177 |
| 52_MCV | (rG)(rU)(rU)(mU)(rA)(rC)(rG)(mU)(rC)(rG)(mG)(rU)(rU)(rG)(mU)(mA) | |
| | (mG)(mC)(rU)(rC)(rC)(rC)(rU)(mU)(mU)#(mC)#(mU)#(mC) | |
| CR42- | (mC)#(mU)#(mG)#(mA)(mA)(rC)(rU)(rU)(mG)(mU)(mG)(rG)(mC)(dC) | 178 |
| 53_MCV | (rG)(rU)(rU)(mU)(rA)(rC)(rG)(mU)(rC)(rG)(mG)(rU)(rU)(rG)(mU)(mA) | |
| | (mG)(mC)(rU)(rC)(rC)(rC)(rU)(mU)(mU)#(mC)#(mU)#(mC) | |
| CR42- | (mC)#(mU)#(mG)#(mA)(mA)(rC)(rU)(rU)(mG)(mU)(mG)(rG)(mC)(rC) | 179 |
| 54_MCV | (dG)(rU)(rU)(mU)(rA)(rC)(rG)(mU)(rC)(rG)(mG)(rU)(rU)(rG)(mU)(mA) | |
| | (mG)(mC)(rU)(rC)(rC)(rC)(rU)(mU)(mU)#(mC)#(mU)#(mC) | |
| CR42- | (mC)#(mU)#(mG)#(mA)(mA)(rC)(rU)(rU)(mG)(mU)(mG)(rG)(mC)(rC) | 180 |
| 55_MCV | (rG)(dT)(rU)(mU)(rA)(rC)(rG)(mU)(rC)(rG)(mG)(rU)(rU)(rG)(mU)(mA) | |
| | (mG)(mC)(rU)(rC)(rC)(rC)(rU)(mU)(mU)#(mC)#(mU)#(mC) | |
| CR42- | (mC)#(mU)#(mG)#(mA)(mA)(rC)(rU)(rU)(mG)(mU)(mG)(rG)(mC)(rC) | 181 |
| 56_MCV | (rG)(rU)(dT)(mU)(rA)(rC)(rG)(mU)(rC)(rG)(mG)(rU)(rU)(rG)(mU)(mA) | |
| | (mG)(mC)(rU)(rC)(rC)(rC)(rU)(mU)(mU)#(mC)#(mU)#(mC) | |
| CR42- | (mC)#(mU)#(mG)#(mA)(mA)(rC)(rU)(rU)(mG)(mU)(mG)(rG)(mC)(rC) | 182 |
| 57_MCV | (rG)(rU)(rU)(mU)(dA)(rC)(rG)(mU)(rC)(rG)(mG)(rU)(rU)(rG)(mU)(mA) | |
| | (mG)(mC)(rU)(rC)(rC)(rC)(rU)(mU)(mU)#(mC)#(mU)#(mC) | |
| CR42- | (mC)#(mU)#(mG)#(mA)(mA)(rC)(rU)(rU)(mG)(mU)(mG)(rG)(mC)(rC) | 183 |
| 58_MC | (rG)(rU)(rU)(mU)(rA)(dC)(rG)(mU)(rC)(rG)(mG)(rU)(rU)(rG)(mU)(mA) | |
| | (mG)(mC)(rU)(rC)(rC)(rC)(rU)(mU)(mU)#(mC)#(mU)#(mC) | |
| CR42- | (mC)#(mU)#(mG)#(mA)(mA)(rC)(rU)(rU)(mG)(mU)(mG)(rG)(mC)(rC) | 184 |
| 59_MCV | (rG)(rU)(rU)(mU)(rA)(rC)(dG)(mU)(rC)(rG)(mG)(rU)(rU)(rG)(mU)(mA) | |
| | (mG)(mC)(rU)(rC)(rC)(rC)(rU)(mU)(mU)#(mC)#(mU)#(mC) | |
| CR42- | (mC)#(mU)#(mG)#(mA)(mA)(rC)(rU)(rU)(mG)(mU)(mG)(rG)(mC)(rC) | 185 |
| 60_MCV | (rG)(rU)(rU)(mU)(rA)(rC)(rG)(mU)(dC)(rG)(mG)(rU)(rU)(rG)(mU)(mA) | |
| | (mG)(mC)(rU)(rC)(rC)(rC)(rU)(mU)(mU)#(mC)#(mU)#(mC) | |
| CR42- | (mC)#(mU)#(mG)#(mA)(mA)(rC)(rU)(rU)(mG)(mU)(mG)(rG)(mC)(rC) | 186 |
| 61_MCV | (rG)(rU)(rU)(mU)(rA)(rC)(rG)(mU)(rC)(dG)(mG)(rU)(rU)(rG)(mU)(mA) | |
| | (mG)(mC)(rU)(rC)(rC)(rC)(rU)(mU)(mU)#(mC)#(mU)#(mC) | |
| CR42- | (mC)#(mU)#(mG)#(mA)(mA)(rC)(rU)(rU)(mG)(mU)(mG)(rG)(mC)(rC) | 187 |
| 62_MCV | (rG)(rU)(rU)(mU)(rA)(rC)(rG)(mU)(rC)(rG)(mG)(dT)(rU)(rG)(mU)(mA) | |
| | (mG)(mC)(rU)(rC)(rC)(rC)(rU)(mU)(mU)#(mC)#(mU)#(mC) | |
| CR42- | (mC)#(mU)#(mG)#(mA)(mA)(rC)(rU)(rU)(mG)(mU)(mG)(rG)(mC)(rC) | 188 |
| 63_MCV | (rG)(rU)(rU)(mU)(rA)(rC)(rG)(mU)(rC)(rG)(mG)(rU)(dT)(rG)(mU)(mA) | |
| | (mG)(mC)(rU)(rC)(rC)(rC)(rU)(mU)(mU)#(mC)#(mU)#(mC) | |
| CR42- | (mC)#(mU)#(mG)#(mA)(mA)(rC)(rU)(rU)(mG)(mU)(mG)(rG)(mC)(rC) | 189 |
| 64_MCV | (rG)(rU)(rU)(mU)(rA)(rC)(rG)(mU)(rC)(rG)(mG)(rU)(rU)(dG)(mU)(mA) | |
| | (mG)(mC)(rU)(rC)(rC)(rC)(rU)(mU)(mU)#(mC)#(mU)#(mC) | |
| CR42- | (mC)#(mU)#(mG)#(mA)(mA)(rC)(rU)(rU)(mG)(mU)(mG)(rG)(mC)(rC) | 190 |
| 65_MCV | (rG)(rU)(rU)(mU)(rA)(rC)(rG)(mU)(rC)(rG)(mG)(rU)(rU)(rG)(mU)(mA) | |
| | (mG)(mC)(dT)(rC)(rC)(rC)(rU)(mU)(mU)#(mC)#(mU)#(mC) | |
| CR42- | (mC)#(mU)#(mG)#(mA)(mA)(rC)(rU)(rU)(mG)(mU)(mG)(rG)(mC)(rC) | 191 |
| 66_MCV | (rG)(rU)(rU)(mU)(rA)(rC)(rG)(mU)(rC)(rG)(mG)(rU)(rU)(rG)(mU)(mA) | |
| | (mG)(mC)(rU)(dC)(rC)(rC)(rU)(mU)(mU)#(mC)#(mU)#(mC) | |
| CR42- | (mC)#(mU)#(mG)#(mA)(mA)(rC)(rU)(rU)(mG)(mU)(mG)(rG)(mC)(rC) | 192 |
| 67_MCV | (rG)(rU)(rU)(mU)(rA)(rC)(rG)(mU)(rC)(rG)(mG)(rU)(rU)(rG)(mU)(mA) | |
| | (mG)(mC)(rU)(rC)(dC)(rC)(rU)(mU)(mU)#(mC)#(mU)#(mC) | |
| CR42- | (mC)#(mU)#(mG)#(mA)(mA)(rC)(rU)(rU)(mG)(mU)(mG)(rG)(mC)(rC) | 193 |
| 68_MCV | (rG)(rU)(rU)(mU)(rA)(rC)(rG)(mU)(rC)(rG)(mG)(rU)(rU)(rG)(mU)(mA) | |
| | (mG)(mC)(rU)(rC)(rC)(dC)(rU)(mU)(mU)#(mC)#(mU)#(mC) | |
| CR42- | (mC)#(mU)#(mG)#(mA)(mA)(rC)(rU)(rU)(mG)(mU)(mG)(rG)(mC)(rC) | 194 |
| 69_MCV | (rG)(rU)(rU)(mU)(rA)(rC)(rG)(mU)(rC)(rG)(mG)(rU)(rU)(rG)(mU)(mA) | |
| | (mG)(mC)(rU)(rC)(rC)(rC)(dT)(mU)(mU)#(mC)#(mU)#(mC) | |
| CR42- | (mC)#(mU)#(mG)#(mA)(mA)(rC)#(rU)(rU)(mG)(mU)(mG)(rG)(mC)(rC) | 195 |
| 70_MCV | (rG)(rU)(rU)(mU)(rA)(rC)(rG)(mU)(rC)(rG)(mG)(rU)(rU)(rG)(mU)(mA) | |
| | (mG)(mC)(rU)(rC)(rC)(rC)(rU)(mU)(mU)#(mC)#(mU)#(mC) | |
| CR42- | (mC)#(mU)#(mG)#(mA)(mA)(rC)(rU)#(rU)(mG)(mU)(mG)(rG)(mC)(rC) | 196 |
| 71_MCV | (rG)(rU)(rU)(mU)(rA)(rC)(rG)(mU)(rC)(rG)(mG)(rU)(rU)(rG)(mU)(mA) | |
| | (mG)(mC)(rU)(rC)(rC)(rC)(rU)(mU)(mU)#(mC)#(mU)#(mC) | |
| CR42- | (mC)#(mU)#(mG)#(mA)(mA)(rC)(rU)(rU)#(mG)(mU)(mG)(rG)(mC)(rC) | 197 |
| 72_MCV | (rG)(rU)(rU)(mU)(rA)(rC)(rG)(mU)(rC)(rG)(mG)(rU)(rU)(rG)(mU)(mA) | |
| | (mG)(mC)(rU)(rC)(rC)(rC)(rU)(mU)(mU)#(mC)#(mU)#(mC) | |
| CR42- | (mC)#(mU)#(mG)#(mA)(mA)(rC)(rU)(rU)(mG)(mU)(mG)(rG)#(mC)(rC) | 198 |
| 73_MCV | (rG)(rU)(rU)(mU)(rA)(rC)(rG)(mU)(rC)(rG)(mG)(rU)(rU)(rG)(mU)(mA) | |
| | (mG)(mC)(rU)(rC)(rC)(rC)(rU)(mU)(mU)#(mC)#(mU)#(mC) | |
| CR42- | (mC)#(mU)#(mG)#(mA)(mA)(rC)(rU)(rU)(mG)(mU)(mG)(rG)(mC)(rC)# | 199 |
| 74_MCV | (rG)(rU)(rU)(mU)(rA)(rC)(rG)(mU)(rC)(rG)(mG)(rU)(rU)(rG)(mU)(mA) | |
| | (mG)(mC)(rU)(rC)(rC)(rC)(rU)(mU)(mU)#(mC)#(mU)#(mC) | |
| CR42- | (mC)#(mU)#(mG)#(mA)(mA)(rC)(rU)(rU)(mG)(mU)(mG)(rG)(mC)(rC) | 200 |
| 75_MCV | (rG)#(rU)(rU)(mU)(rA)(rC)(rG)(mU)(rC)(rG)(mG)(rU)(rU)(rG)(mU)(mA) | |
| | (mG)(mC)(rU)(rC)(rC)(rC)(rU)(mU)(mU)#(mC)#(mU)#(mC) | |
| CR42- | (mC)#(mU)#(mG)#(mA)(mA)(rC)(rU)(rU)(mG)(mU)(mG)(rG)(mC)(rC) | 201 |
| 76_MCV | (rG)(rU)#(rU)(mU)(rA)(rC)(rG)(mU)(rC)(rG)(mG)(rU)(rU)(rG)(mU)(mA) | |
| | (mG)(mC)(rU)(rC)(rC)(rC)(rU)(mU)(mU)#(mC)#(mU)#(mC) | |
| CR42- | (mC)#(mU)#(mG)#(mA)(mA)(rC)(rU)(rU)(mG)(mU)(mG)(rG)(mC)(rC) | 202 |
| 77_MCV | (rG)(rU)(rU)#(mU)(rA)(rC)(rG)(mU)(rC)(rG)(mG)(rU)(rU)(rG)(mU)(mA) | |
| | (mG)(mC)(rU)(rC)(rC)(rC)(rU)(mU)(mU)#(mC)#(mU)#(mC) | |
| CR42- | (mC)#(mU)#(mG)#(mA)(mA)(rC)(rU)(rU)(mG)(mU)(mG)(rG)(mC)(rC) | 203 |
| 78_MCV | (rG)(rU)(rU)(mU)(rA)#(rC)(rG)(mU)(rC)(rG)(mG)(rU)(rU)(rG)(mU)(mA) | |
| | (mG)(mC)(rU)(rC)(rC)(rC)(rU)(mU)(mU)#(mC)#(mU)#(mC) | |
| CR42- | (mC)#(mU)#(mG)#(mA)(mA)(rC)(rU)(rU)(mG)(mU)(mG)(rG)(mC)(rC) | 204 |
| 79_MCV | (rG)(rU)(rU)(mU)(rA)(rC)#(rG)(mU)(rC)(rG)(mG)(rU)(rU)(rG)(mU)(mA) | |
| | (mG)(mC)(rU)(rC)(rC)(rC)(rU)(mU)(mU)#(mC)#(mU)#(mC) | |
| CR42- | (mC)#(mU)#(mG)#(mA)(mA)(rC)(rU)(rU)(mG)(mU)(mG)(rG)(mC)(rC) | 205 |
| 80_MCV | (rG)(rU)(rU)(mU)(rA)(rC)(rG)#(mU)(rC)(rG)(mG)(rU)(rU)(rG)(mU)(mA) | |
| V | (mG)(mC)(rU)(rC)(rC)(rC)(rU)(mU)(mU)#(mC)#(mU)#(mC) | |
| CR42- | (mC)#(mU)#(mG)#(mA)(mA)(rC)(rU)(rU)(mG)(mU)(mG)(rG)(mC)(rC) | 206 |
| 81_MCV | (rG)(rU)(rU)(mU)(rA)(rC)(rG)(mU)(rC)#(rG)(mG)(rU)(rU)(rG)(mU)(mA) | |
| | (mG)(mC)(rU)(rC)(rC)(rC)(rU)(mU)(mU)#(mC)#(mU)#(mC) | |
| CR42- | (mC)#(mU)#(mG)#(mA)(mA)(rC)(rU)(rU)(mG)(mU)(mG)(rG)(mC)(rC) | 207 |
| 82_MCV | (rG)(rU)(rU)(mU)(rA)(rC)(rG)(mU)(rC)(rG)#(mG)(rU)(rU)(rG)(mU)(mA) | |
| | (mG)(mC)(rU)(rC)(rC)(rC)(rU)(mU)(mU)#(mC)#(mU)#(mC) | |
| CR42- | (mC)#(mU)#(mG)#(mA)(mA)(rC)(rU)(rU)(mG)(mU)(mG)(rG)(mC)(rC) | 208 |
| 83_MCV | (rG)(rU)(rU)(mU)(rA)(rC)(rG)(mU)(rC)(rG)(mG)(rU)#(rU)(rG)(mU)(mA) | |
| | (mG)(mC)(rU)(rC)(rC)(rC)(rU)(mU)(mU)#(mC)#(mU)#(mC) | |
| CR42- | (mC)#(mU)#(mG)#(mA)(mA)(rC)(rU)(rU)(mG)(mU)(mG)(rG)(mC)(rC) | 209 |
| 84_MCV | (rG)(rU)(rU)(mU)(rA)(rC)(rG)(mU)(rC)(rG)(mG)(rU)(rU)#(rG)(mU)(mA) | |
| | (mG)(mC)(rU)(rC)(rC)(rC)(rU)(mU)(mU)#(mC)#(mU)#(mC) | |
| CR42- | (mC)#(mU)#(mG)#(mA)(mA)(rC)(rU)(rU)(mG)(mU)(mG)(rG)(mC)(rC) | 210 |
| 85_MCV | (rG)(rU)(rU)(mU)(rA)(rC)(rG)(mU)(rC)(rG)(mG)(rU)(rU)(rG)#(mU)(mA) | |
| | (mG)(mC)(rU)(rC)(rC)(rC)(rU)(mU)(mU)#(mC)#(mU)#(mC) | |
| CR42- | (mC)#(mU)#(mG)#(mA)(mA)(rC)(rU)(rU)(mG)(mU)(mG)(rG)(mC)(rC) | 211 |
| 86_MCV | (rG)(rU)(rU)(mU)(rA)(rC)(rG)(mU)(rC)(rG)(mG)(rU)(rU)(rG)(mU)(mA) | |
| | (mG)(mC)(rU)#(rC)(rC)(rC)(rU)(mU)(mU)#(mC)#(mU)#(mC) | |
| CR42- | (mC)#(mU)#(mG)#(mA)(mA)(rC)(rU)(rU)(mG)(mU)(mG)(rG)(mC)(rC) | 212 |
| 87_MCV | (rG)(rU)(rU)(mU)(rA)(rC)(rG)(mU)(rC)(rG)(mG)(rU)(rU)(rG)(mU)(mA) | |
| | (mG)(mC)(rU)(rC)#(rC)(rC)(rU)(mU)(mU)#(mC)#(mU)#(mC) | |
| CR42- | (mC)#(mU)#(mG)#(mA)(mA)(rC)(rU)(rU)(mG)(mU)(mG)(rG)(mC)(rC) | 213 |
| 88_MCV | (rG)(rU)(rU)(mU)(rA)(rC)(rG)(mU)(rC)(rG)(mG)(rU)(rU)(rG)(mU)(mA) | |
| | (mG)(mC)(rU)(rC)(rC)#(rC)(rU)(mU)(mU)#(mC)#(mU)#(mC) | |
| CR42- | (mC)#(mU)#(mG)#(mA)(mA)(rC)(rU)(rU)(mG)(mU)(mG)(rG)(mC)(rC) | 214 |
| 89_MCV | (rG)(rU)(rU)(mU)(rA)(rC)(rG)(mU)(rC)(rG)(mG)(rU)(rU)(rG)(mU)(mA) | |
| | (mG)(mC)(rU)(rC)(rC)(rC)#(rU)(mU)(mU)#(mC)#(mU)#(mC) | |
| CR42- | (mC)#(mU)#(mG)#(mA)(mA)(rC)(rU)(rU)(mG)(mU)(mG)(rG)(mC)(rC) | 215 |
| 90_MCV | (rG)(rU)(rU)(mU)(rA)(rC)(rG)(mU)(rC)(rG)(mG)(rU)(rU)(rG)(mU)(mA) | |
| | (mG)(mC)(rU)(rC)(rC)(rC)(rU)#(mU)(mU)#(mC)#(mU)#(mC) | |
| CR42- | (mC)#(mU)#(mG)#(mA)(mA)(dC)(dT)(dT)(mG)(mU)(mG)(mG)(mC) | 216 |
| 91_MCV | (mC)(rG)(rU)(rU)(mU)(rA)(rC)(rG)(mU)(rC)(rG)(mG)(rU)(rU)(rG)(mU) | |
| | (mA)(mG)(mC)(rU)(rC)(rC)(rC)(rU)(mU)(mU)#(mC)#(mU)#(mC) | |
| CR42- | (mC)#(mU)#(mG)#(mA)(mA)(rC)#(rU)#(rU)#(mG)(mU)(mG)(mG)(mC) | 217 |
| 92_MCV | (mC)(rG)(rU)(rU)(mU)(rA)(rC)(rG)(mU)(rC)(rG)(mG)(rU)(rU)(rG)(mU) | |
| | (mA)(mG)(mC)(rU)(rC)(rC)(rC)(rU)(mU)(mU)#(mC)#(mU)#(mC) | |
| CR42- | (mC)#(mU)#(mG)#(mA)(mA)(dC)#(dT)#(dT)#(mG)(mU)(mG)(mG)(mC) | 218 |
| 93_MCV | (mC)(rG)(rU)(rU)(mU)(rA)(rC)(rG)(mU)(rC)(rG)(mG)(rU)(rU)(rG)(mU) | |
| | (mA)(mG)(mC)(rU)(rC)(rC)(rC)(rU)(mU)(mU)#(mC)#(mU)#(mC) | |
| CR42- | (mC)#(mU)(mG)(mA)(mA)(rC)(rU)(rU)(mG)(mU)#(mG)(rG)(mC)(rC)# | 219 |
| 94_MCV | (rG)(rU)(rU)(mU)(rA)(rC)(rG)(mU)(rC)(rG)#(mG)(rU)(rU)(rG)(mU)#(mA) | |
| | #(mG)#(mC)#(rU)#(rC)#(rC)(rC)#(rU)#(mU)#(mU)#(mC)#(mU)#(mC) | |
| CR42- | (mC)#(mU)#(mG)#(mA)(mA)(rC)(rU)(rU)(mG)(mU)#(mG)(rG)(mC)(rC) | 220 |
| 95_MCV | #(rG)(rU)(rU)(mU)(rA)(rC)(rG)(mU)(rC)(rG)#(mG)(rU)(rU)(rG)(mU)# | |
| | (mA)#(mG)#(mC)#(rU)#(rC)#(rC)(rC)#(rU)#(mU)#(mU)#(mC)#(mU)#(mC) | |
| CR42- | (mC)#(mU)#(mG)#(mA)(mA)(rC)#(rU)#(rU)#(mG)(mU)#(mG)(rG)(mC) | 221 |
| 96_MCV | (rC)#(rG)(rU)(rU)(mU)(rA)(rC)(rG)(mU)(rC)(rG)#(mG)(rU)(rU)(rG)(mU) | |
| | #(mA)#(mG)#(mC)#(rU)#(rC)#(rC)(rC)#(rU)#(mU)#(mU)#(mC)#(mU)# | |
| | (mC) | |
| CR42- | (mC)#(mU)#(mG)#(mA)(mA)(rC)(rU)(rU)(mG)(mU)(mG)(rG)(mC)(rC) | 222 |
| 97_MCV | (rG)(rU)(rU)(mU)(rA)(rC)(rG)(mU)(rC)(rG)(mG)(dU)#(dU)#(mG)(mU) | |
| | (mA)(mG)(mC)(rU)(rC)(rC)(rC)(rU)(mU)(mU)#(mC)#(mU)#(mC) | |
| CR42- | (mC)#(mU)#(mG)#(mA)(mA)(rC)(rU)(rU)(mG)(mU)(mG)(rG)(mC)(rC) | 223 |
| 98_MCV | (rG)(rU)(rU)(mU)(rA)(rC)(rG)(mU)(rC)(rG)(mG)(dU)#(dU)#(dG)#(mU) | |
| | (mA)(mG)(mC)(rU)(rC)(rC)(rC)(rU)(mU)(mU)#(mC)#(mU)#(mC) | |
| CR42- | (mC)#(mU)#(mG)#(mA)(mA)(rC)(rU)(rU)(mG)(mU)(mG)(rG)(mC)(rC) | 224 |
| 99_MCV | (rG)(rU)(rU)(mU)(rA)(rC)(rG)(mU)(rC)(rG)(mG)(rU)(rU)(rG)(mU)(mA) | |
| | (mG)(mC)(dU)#(dC)#(dC)#(rC)(dU)#(mU)(mU)#(mC)#(mU)#(mC) | |
| CR42- | (mC)#(mU)#(mG)#(mA)(mA)(rC)(rU)(rU)(mG)(mU)(mG)(rG)(mC)(rC) | 225 |
| 100_MCV | (rG)(rU)(rU)(mU)(rA)(rC)(rG)(mU)(rC)(rG)(mG)(rU)(rU)(rG)(mU)(mA) | |
| | (mG)(mC)(dU)#(dC)#(dC)#(mC)(dU)#(mU)(mU)#(mC)#(mU)#(mC) | |
| CR42- | (mC)#(mU)#(mG)#(mA)(mA)(rC)(rU)(rU)(mG)(mU)(mG)(rG)(mC)(rC) | 226 |
| 101_MCV | (rG)(rU)(rU)(mU)(rA)(rC)(rG)(mU)(rC)(rG)(mG)(rU)(rU)(rG)(mU)(mA) | |
| | (mG)(mC)(mU)(dC)#(dC)#(rC)(dU)#(mU)(mU)#(mC)#(mU)#(mC) | |
| CR42- | (mC)#(mU)#(mG)#(mA)(mA)(rC)(rU)(rU)(mG)(mU)(mG)(rG)(mC)(rC) | 227 |
| 102_MCV | (rG)(rU)(rU)(mU)(rA)(rC)(rG)(mU)(rC)(rG)(mG)(rU)(rU)(rG)(mU)(mA) | |
| | (mG)(mC)(dU)#(mC)(dC)#(rC)(dU)#(mU)(mU)#(mC)#(mU)#(mC) | |
| CR42- | (mC)#(mU)#(mG)#(mA)(mA)(rC)(rU)(rU)(mG)(mU)(mG)(rG)(mC)(rC) | 228 |
| 103_MCV | (rG)(rU)(rU)(mU)(rA)(rC)(rG)(mU)(rC)(rG)(mG)(rU)(rU)(rG)(mU)(mA) | |
| | (mG)(mC)(dU)#(dC)#(mC)(rC)(dU)#(mU)(mU)#(mC)#(mU)#(mC) | |
| CR42- | (mC)#(mU)#(mG)#(mA)(mA)(rC)(rU)(rU)(mG)(mU)(mG)(rG)(mC)(rC) | 229 |
| 104_MCV | (rG)(rU)(rU)(mU)(rA)(rC)(rG)(mU)(rC)(rG)(mG)(rU)(rU)(rG)(mU)(mA) | |
| | (mG)(mC)(mU)(mC)(dC)#(rC)(dU)#(mU)(mU)#(mC)#(mU)#(mC) | |
| CR42- | (mC)#(mU)#(mG)#(mA)(mA)(rC)(rU)(rU)(mG)(mU)(mG)(rG)(mC)(rC) | 230 |
| 105_MCV | (rG)(rU)(rU)(mU)(rA)(rC)(rG)(mU)(rC)(rG)(mG)(rU)(rU)(rG)(mU)(mA) | |
| | (mG)(mC)(mU)(dC)#(mC)(rC)(dU)#(mU)(mU)#(mC)#(mU)#(mC) | |
| CR42- | (mC)#(mU)#(mG)#(mA)(mA)(rC)(rU)(rU)(mG)(mU)(mG)(rG)(mC)(rC) | 231 |
| 106_MCV | (rG)(rU)(rU)(mU)(rA)(rC)(rG)(mU)(rC)(rG)(mG)(rU)(rU)(rG)(mU)(mA) | |
| | (mG)(mC)(dU)#(mC)(mC)(rC)(dU)#(mU)(mU)#(mC)#(mU)#(mC) | |
| CR42- | (mC)#(mU)#(mG)#(mA)(mA)(rC)(rU)(rU)(mG)(mU)(mG)(rG)(mC)(rC) | 232 |
| 107_MCV | (rG)(rU)(rU)(mU)(rA)(rC)(rG)(mU)(rC)(rG)(mG)(rU)(rU)(rG)(mU)(mA) | |
| | (mG)(mC)(mU)(mC)(mC)(rC)(dU)#(mU)(mU)#(mC)#(mU)#(mC) | |
| CR42- | (mC)#(mU)#(mG)#(mA)(mA)(rC)(rU)(rU)(mG)(mU)(mG)(rG)(mC)(rC) | 233 |
| 108_MCV | (rG)(rU)(rU)(mU)(rA)(rC)(rG)(mU)(rC)(rG)(mG)(dU)#(dU)#(mG)(mU) | |
| | (mA)(mG)(mC)(dU)#(dC)#(dC)#(rC)(dU)#(mU)(mU)#(mC)#(mU)#(mC) | |
| CR42- | (mC)#(mU)#(mG)#(mA)(mA)(rC)(rU)(rU)(mG)(mU)(mG)(rG)(mC)(rC) | 234 |
| 109_MCV | (rG)(rU)(rU)(mU)(rA)(rC)(rG)(mU)(rC)(rG)(mG)(dU)#(dU)#(mG)(mU) | |
| | (mA)(mG)(mC)(dU)#(dC)#(dC)#(mC)(dU)#(mU)(mU)#(mC)#(mU)#(mC) | |
| CR42- | (mC)#(mU)#(mG)#(mA)(mA)(rC)(rU)(rU)(mG)(mU)(mG)(rG)(mC)(rC) | 235 |
| 110_MCV | (rG)(rU)(rU)(mU)(rA)(rC)(rG)(mU)(rC)(rG)(mG)(dU)#(dU)#(mG)(mU) | |
| | (mA)(mG)(mC)(mU)(dC)#(dC)#(rC)(dU)#(mU)(mU)#(mC)#(mU)#(mC) | |
| CR42- | (mC)#(mU)#(mG)#(mA)(mA)(rC)(rU)(rU)(mG)(mU)(mG)(rG)(mC)(rC) | 236 |
| 111_MCV | (rG)(rU)(rU)(mU)(rA)(rC)(rG)(mU)(rC)(rG)(mG)(dU)#(dU)#(mG)(mU) | |
| | (mA)(mG)(mC)(dU)#(mC)(dC)#(rC)(dU)#(mU)(mU)#(mC)#(mU)#(mC) | |
| CR42- | (mC)#(mU)#(mG)#(mA)(mA)(rC)(rU)(rU)(mG)(mU)(mG)(rG)(mC)(rC) | 237 |
| 112_MCV | (rG)(rU)(rU)(mU)(rA)(rC)(rG)(mU)(rC)(rG)(mG)(dU)#(dU)#(mG)(mU) | |
| | (mA)(mG)(mC)(dU)#(dC)#(mC)(rC)(dU)#(mU)(mU)#(mC)#(mU)#(mC) | |
| CR42- | (mC)#(mU)#(mG)#(mA)(mA)(rC)(rU)(rU)(mG)(mU)(mG)(rG)(mC)(rC) | 238 |
| 113_MCV | (rG)(rU)(rU)(mU)(rA)(rC)(rG)(mU)(rC)(rG)(mG)(dU)#(dU)#(mG)(mU) | |
| | (mA)(mG)(mC)(mU)(mC)(dC)#(rC)(dU)#(mU)(mU)#(mC)#(mU)#(mC) | |
| CR42- | (mC)#(mU)#(mG)#(mA)(mA)(rC)(rU)(rU)(mG)(mU)(mG)(rG)(mC)(rC) | 239 |
| 114_MCV | (rG)(rU)(rU)(mU)(rA)(rC)(rG)(mU)(rC)(rG)(mG)(dU)#(dU)#(mG)(mU) | |
| | (mA)(mG)(mC)(mU)(dC)#(mC)(rC)(dU)#(mU)(mU)#(mC)#(mU)#(mC) | |
| CR42- | (mC)#(mU)#(mG)#(mA)(mA)(rC)(rU)(rU)(mG)(mU)(mG)(rG)(mC)(rC) | 240 |
| 115_MCV | (rG)(rU)(rU)(mU)(rA)(rC)(rG)(mU)(rC)(rG)(mG)(dU)#(dU)#(mG)(mU) | |
| | (mA)(mG)(mC)(dU)#(mC)(mC)(rC)(dU)#(mU)(mU)#(mC)#(mU)#(mC) | |
| CR42- | (mC)#(mU)#(mG)#(mA)(mA)(rC)(rU)(rU)(mG)(mU)(mG)(rG)(mC)(rC) | 241 |
| 116_MCV | (rG)(rU)(rU)(mU)(rA)(rC)(rG)(mU)(rC)(rG)(mG)(dU)#(dU)#(mG)(mU) | |
| | (mA)(mG)(mC)(mU)(mC)(mC)(rC)(dU)#(mU)(mU)#(mC)#(mU)#(mC) | |
| CR42- | (mC)#(mU)#(mG)#(mA)(mA)(rC)(rU)(rU)(mG)(mU)(mG)(rG)(mC)(rC) | 242 |
| 117_MCV | (rG)(rU)(rU)(mU)(rA)(rC)(rG)(mU)(rC)(rG)(mG)(dU)#(dU)#(dG)#(mU) | |
| | (mA)(mG)(mC)(dU)#(dC)#(dC)#(rC)(dU)#(mU)(mU)#(mC)#(mU)#(mC) | |
| CR42- | (mC)#(mU)#(mG)#(mA)(mA)(rC)(rU)(rU)(mG)(mU)(mG)(rG)(mC)(rC) | 243 |
| 118_MCV | (rG)(rU)(rU)(mU)(rA)(rC)(rG)(mU)(rC)(rG)(mG)(dU)#(dU)#(dG)#(mU) | |
| | (mA)(mG)(mC)(dU)#(dC)#(dC)#(mC)(dU)#(mU)(mU)#(mC)#(mU)#(mC) | |
| CR42- | (mC)#(mU)#(mG)#(mA)(mA)(rC)(rU)(rU)(mG)(mU)(mG)(rG)(mC)(rC) | 244 |
| 119_MCV | (rG)(rU)(rU)(mU)(rA)(rC)(rG)(mU)(rC)(rG)(mG)(dU)#(dU)#(dG)#(mU) | |
| | (mA)(mG)(mC)(mU)(dC)#(dC)#(rC)(dU)#(mU)(mU)#(mC)#(mU)#(mC) | |
| CR42- | (mC)#(mU)#(mG)#(mA)(mA)(rC)(rU)(rU)(mG)(mU)(mG)(rG)(mC)(rC) | 245 |
| 120_MCV | (rG)(rU)(rU)(mU)(rA)(rC)(rG)(mU)(rC)(rG)(mG)(dU)#(dU)#(dG)#(mU) | |
| | (mA)(mG)(mC)(dU)#(mC)(dC)#(rC)(dU)#(mU)(mU)#(mC)#(mU)#(mC) | |
| CR42- | (mC)#(mU)#(mG)#(mA)(mA)(rC)(rU)(rU)(mG)(mU)(mG)(rG)(mC)(rC) | 246 |
| 121_MCV | (rG)(rU)(rU)(mU)(rA)(rC)(rG)(mU)(rC)(rG)(mG)(dU)#(dU)#(dG)#(mU) | |
| | (mA)(mG)(mC)(dU)#(dC)#(mC)(rC)(dU)#(mU)(mU)#(mC)#(mU)#(mC) | |
| CR42- | (mC)#(mU)#(mG)#(mA)(mA)(rC)(rU)(rU)(mG)(mU)(mG)(rG)(mC)(rC) | 247 |
| 122_MCV | (rG)(rU)(rU)(mU)(rA)(rC)(rG)(mU)(rC)(rG)(mG)(dU)#(dU)#(dG)#(mU) | |
| | (mA)(mG)(mC)(mU)(mC)(dC)#(rC)(dU)#(mU)(mU)#(mC)#(mU)#(mC) | |
| CR42- | (mC)#(mU)#(mG)#(mA)(mA)(rC)(rU)(rU)(mG)(mU)(mG)(rG)(mC)(rC) | 248 |
| 123_MCV | (rG)(rU)(rU)(mU)(rA)(rC)(rG)(mU)(rC)(rG)(mG)(dU)#(dU)#(dG)#(mU) | |
| | (mA)(mG)(mC)(mU)(dC)#(mC)(rC)(dU)#(mU)(mU)#(mC)#(mU)#(mC) | |
| CR42- | (mC)#(mU)#(mG)#(mA)(mA)(rC)(rU)(rU)(mG)(mU)(mG)(rG)(mC)(rC) | 249 |
| 124_MCV | (rG)(rU)(rU)(mU)(rA)(rC)(rG)(mU)(rC)(rG)(mG)(dU)#(dU)#(dG)#(mU) | |
| | (mA)(mG)(mC)(dU)#(mC)(mC)(rC)(dU)#(mU)(mU)#(mC)#(mU)#(mC) | |
| CR42- | (mC)#(mU)#(mG)#(mA)(mA)(rC)(rU)(rU)(mG)(mU)(mG)(rG)(mC)(rC) | 250 |
| 125_MCV | (rG)(rU)(rU)(mU)(rA)(rC)(rG)(mU)(rC)(rG)(mG)(dU)#(dU)#(dG)#(mU) | |
| | (mA)(mG)(mC)(mU)(mC)(mC)(rC)(dU)#(mU)(mU)#(mC)#(mU)#(mC) | |
| CR42- | (mC)#(mU)#(mG)#(mA)(mA)(mC)(fU)(mU)(mG)(mU)(mG)(rG)(mC)(rC) | 251 |
| 126_MCV | (rG)(rU)(rU)(mU)(rA)(rC)(rG)(mU)(rC)(rG)(mG)(rU)(rU)(rG)(mU)(mA) | |
| | (mG)(mC)(rU)(rC)(rC)(rC)(rU)(mU)(mU)#(mC)#(mU)#(mC) | |
| CR42- | (mC)#(mU)#(mG)#(mA)(mA)(mC)(fU)(dU)#(mG)(mU)(mG)(rG)(mC) | 252 |
| 127_MCV | (rC)(rG)(rU)(rU)(mU)(rA)(rC)(rG)(mU)(rC)(rG)(mG)(rU)(rU)(rG)(mU) | |
| | (mA)(mG)(mC)(rU)(rC)(rC)(rC)(rU)(mU)(mU)#(mC)#(mU)#(mC) | |
| CR42- | (mC)#(mU)#(mG)#(mA)(mA)(mC)(dU)#(mU)(mG)(mU)(mG)(rG)(mC) | 253 |
| 128_MCV | (rC)(rG)(rU)(rU)(mU)(rA)(rC)(rG)(mU)(rC)(rG)(mG)(rU)(rU)(rG)(mU) | |
| | (mA)(mG)(mC)(rU)(rC)(rC)(rC)(rU)(mU)(mU)#(mC)#(mU)#(mC) | |
| CR42- | (mC)#(mU)#(mG)#(mA)(mA)(mC)(dU)#(dU)#(mG)(mU)(mG)(rG)(mC) | 254 |
| 129_MCV | (rC)(rG)(rU)(rU)(mU)(rA)(rC)(rG)(mU)(rC)(rG)(mG)(rU)(rU)(rG)(mU) | |
| | (mA)(mG)(mC)(rU)(rC)(rC)(rC)(rU)(mU)(mU)#(mC)#(mU)#(mC) | |
| CR42- | (mC)#(mU)#(mG)#(mA)(mA)(fC)(fU)(mU)(mG)(mU)(mG)(rG)(mC)(rC) | 255 |
| 130_MCV | (rG)(rU)(rU)(mU)(rA)(rC)(rG)(mU)(rC)(rG)(mG)(rU)(rU)(rG)(mU)(mA) | |
| | (mG)(mC)(rU)(rC)(rC)(rC)(rU)(mU)(mU)#(mC)#(mU)#(mC) | |
| CR42- | (mC)#(mU)#(mG)#(mA)(mA)(fC)(fU)(dU)#(mG)(mU)(mG)(rG)(mC)(rC) | 256 |
| 131_MCV | (rG)(rU)(rU)(mU)(rA)(rC)(rG)(mU)(rC)(rG)(mG)(rU)(rU)(rG)(mU)(mA) | |
| | (mG)(mC)(rU)(rC)(rC)(rC)(rU)(mU)(mU)#(mC)#(mU)#(mC) | |
| CR42- | (mC)#(mU)#(mG)#(mA)(mA)(fC)(dU)#(mU)(mG)(mU)(mG)(rG)(mC) | 257 |
| 132_MCV | (rC)(rG)(rU)(rU)(mU)(rA)(rC)(rG)(mU)(rC)(rG)(mG)(rU)(rU)(rG)(mU) | |
| | (mA)(mG)(mC)(rU)(rC)(rC)(rC)(rU)(mU)(mU)#(mC)#(mU)#(mC) | |
| CR42- | (mC)#(mU)#(mG)#(mA)(mA)(fC)(dU)#(dU)#(mG)(mU)(mG)(rG)(mC) | 258 |
| 133_MCV | (rC)(rG)(rU)(rU)(mU)(rA)(rC)(rG)(mU)(rC)(rG)(mG)(rU)(rU)(rG)(mU) | |
| | (mA)(mG)(mC)(rU)(rC)(rC)(rC)(rU)(mU)(mU)#(mC)#(mU)#(mC) | |
| CR42- | (mC)#(mU)#(mG)#(mA)(mA)(rC)(rU)(rU)(mG)(mU)(mG)(rG)(mC)(fC) | 259 |
| 134_MCV | (fG)(fU)(fU)(mU)(rA)(rC)(rG)(mU)(rC)(rG)(mG)(rU)(rU)(rG)(mU)(mA) | |
| | (mG)(mC)(rU)(rC)(rC)(rC)(rU)(mU)(mU)#(mC)#(mU)#(mC) | |
| CR42- | (mC)#(mU)#(mG)#(mA)(mA)(rC)(rU)(rU)(mG)(mU)(mG)(rG)(mC)(fC) | 260 |
| 135_MCV | (mG)(fU)(fU)(mU)(rA)(rC)(rG)(mU)(rC)(rG)(mG)(rU)(rU)(rG)(mU)(mA) | |
| | (mG)(mC)(rU)(rC)(rC)(rC)(rU)(mU)(mU)#(mC)#(mU)#(mC) | |
| CR42- | (mC)#(mU)#(mG)#(mA)(mA)(rC)(rU)(rU)(mG)(mU)(mG)(rG)(mC)(fC) | 261 |
| 136_MCV | (fG)(mU)(fU)(mU)(rA)(rC)(rG)(mU)(rC)(rG)(mG)(rU)(rU)(rG)(mU)(mA) | |
| | (mG)(mC)(rU)(rC)(rC)(rC)(rU)(mU)(mU)#(mC)#(mU)#(mC) | |
| CR42- | (mC)#(mU)#(mG)#(mA)(mA)(rC)(rU)(rU)(mG)(mU)(mG)(rG)(mC)(fC) | 262 |
| 137_MCV | (fG)(fU)(mU)(mU)(rA)(rC)(rG)(mU)(rC)(rG)(mG)(rU)(rU)(rG)(mU)(mA) | |
| | (mG)(mC)(rU)(rC)(rC)(rC)(rU)(mU)(mU)#(mC)#(mU)#(mC) | |
| CR42- | (mC)#(mU)#(mG)#(mA)(mA)(rC)(rU)(rU)(mG)(mU)(mG)(rG)(mC)(fC) | 263 |
| 138_MCV | (mG)(mU)(fU)(mU)(rA)(rC)(rG)(mU)(rC)(rG)(mG)(rU)(rU)(rG)(mU) | |
| | (mA)(mG)(mC)(rU)(rC)(rC)(rC)(rU)(mU)(mU)#(mC)#(mU)#(mC) | |
| CR42- | (mC)#(mU)#(mG)#(mA)(mA)(rC)(rU)(rU)(mG)(mU)(mG)(rG)(mC)(fC) | 264 |
| 139_MCV | (fG)(mU)(mU)(mU)(rA)(rC)(rG)(mU)(rC)(rG)(mG)(rU)(rU)(rG)(mU)(mA) | |
| | (mG)(mC)(rU)(rC)(rC)(rC)(rU)(mU)(mU)#(mC)#(mU)#(mC) | |
| CR42- | (mC)#(mU)#(mG)#(mA)(mA)(rC)(rU)(rU)(mG)(mU)(mG)(rG)(mC)(fC) | 265 |
| 140_MCV | (mG)(fU)(mU)(mU)(rA)(rC)(rG)(mU)(rC)(rG)(mG)(rU)(rU)(rG)(mU)(mA) | |
| | (mG)(mC)(rU)(rC)(rC)(rC)(rU)(mU)(mU)#(mC)#(mU)#(mC) | |
| CR42- | (mC)#(mU)#(mG)#(mA)(mA)(rC)(rU)(rU)(mG)(mU)(mG)(rG)(mC)(fC) | 266 |
| 141_MCV | (mG)(mU)(mU)(mU)(rA)(rC)(rG)(mU)(rC)(rG)(mG)(rU)(rU)(rG)(mU) | |
| | (mA)(mG)(mC)(rU)(rC)(rC)(rC)(rU)(mU)(mU)#(mC)#(mU)#(mC) | |
| CR42- | (mC)#(mU)#(mG)#(mA)(mA)(mC)(dU)#(mU)(mG)(mU)(mG)(rG)(mC) | 267 |
| 142_MCV | (fC)(mG)(fU)(mU)(mU)(rA)(rC)(rG)(mU)(rC)(rG)(mG)(rU)(rU)(rG)(mU) | |
| | (mA)(mG)(mC)(rU)(rC)(rC)(rC)(rU)(mU)(mU)#(mC)#(mU)#(mC) | |
| CR42- | (mC)#(mU)#(mG)#(mA)(mA)(mC)(dU)#(mU)(mG)(mU)(mG)(rG)(mC) | 268 |
| 143_MCV | (fC)(mG)(mU)(mU)(mU)(rA)(rC)(rG)(mU)(rC)(rG)(mG)(rU)(rU)(rG)(mU) | |
| | (mA)(mG)(mC)(rU)(rC)(rC)(rC)(rU)(mU)(mU)#(mC)#(mU)#(mC) | |
| CR42- | (mC)#(mU)#(mG)#(mA)(mA)(fC)(dU)#(mU)(mG)(mU)(mG)(rG)(mC) | 269 |
| 144_MCV | (fC)(mG)(fU)(mU)(mU)(rA)(rC)(rG)(mU)(rC)(rG)(mG)(rU)(rU)(rG)(mU) | |
| | (mA)(mG)(mC)(rU)(rC)(rC)(rC)(rU)(mU)(mU)#(mC)#(mU)#(mC) | |
| CR42- | (mC)#(mU)#(mG)#(mA)(mA)(fC)(dU)#(mU)(mG)(mU)(mG)(rG)(mC) | 270 |
| 145_MCV | (fC)(mG)(mU)(mU)(mU)(rA)(rC)(rG)(mU)(rC)(rG)(mG)(rU)(rU)(rG)(mU) | |
| | (mA)(mG)(mC)(rU)(rC)(rC)(rC)(rU)(mU)(mU)#(mC)#(mU)#(mC) | |
| CR42- | (mC)#(mU)#(mG)#(mA)(mA)(mC)(dU)#(mU)(mG)(mU)(mG)(fG)(mC) | 271 |
| 146_MCV | (rC)(rG)(rU)(rU)(mU)(rA)(rC)(rG)(mU)(rC)(rG)(mG)(rU)(rU)(rG)(mU) | |
| | (mA)(mG)(mC)(rU)(rC)(rC)(rC)(rU)(mU)(mU)#(mC)#(mU)#(mC) | |
| CR42- | (mC)#(mU)#(mG)#(mA)(mA)(mC)(dU)#(mU)(mG)(mU)(mG)(mG)(mC) | 272 |
| 147_MCV | (rC)(rG)(rU)(rU)(mU)(rA)(rC)(rG)(mU)(rC)(rG)(mG)(rU)(rU)(rG)(mU) | |
| | (mA)(mG)(mC)(rU)(rC)(rC)(rC)(rU)(mU)(mU)#(mC)#(mU)#(mC) | |
| CR42- | (mC)#(mU)#(mG)#(mA)(mA)(fC)(dU)#(mU)(mG)(mU)(mG)(fG)(mC) | 273 |
| 148_MCV | (rC)(rG)(rU)(rU)(mU)(rA)(rC)(rG)(mU)(rC)(rG)(mG)(rU)(rU)(rG)(mU) | |
| | (mA)(mG)(mC)(rU)(rC)(rC)(rC)(rU)(mU)(mU)#(mC)#(mU)#(mC) | |
| CR42- | (mC)#(mU)#(mG)#(mA)(mA)(fC)(dU)#(mU)(mG)(mU)(mG)(mG)(mC) | 274 |
| 149_MCV | (rC)(rG)(rU)(rU)(mU)(rA)(rC)(rG)(mU)(rC)(rG)(mG)(rU)(rU)(rG)(mU) | |
| | (mA)(mG)(mC)(rU)(rC)(rC)(rC)(rU)(mU)(mU)#(mC)#(mU)#(mC) | |
| CR42- | (mC)#(mU)#(mG)#(mA)(mA)(rC)(rU)(rU)(mG)(mU)(mG)(fG)(mC)(fC) | 275 |
| 150_MCV | (mG)(fU)(mU)(mU)(rA)(rC)(rG)(mU)(rC)(rG)(mG)(rU)(rU)(rG)(mU) | |
| | (mA)(mG)(mC)(rU)(rC)(rC)(rC)(rU)(mU)(mU)#(mC)#(mU)#(mC) | |
| CR42- | (mC)#(mU)#(mG)#(mA)(mA)(rC)(rU)(rU)(mG)(mU)(mG)(mG)(mC)(fC) | 276 |
| 151_MCV | (mG)(fU)(mU)(mU)(rA)(rC)(rG)(mU)(rC)(rG)(mG)(rU)(rU)(rG)(mU) | |
| | (mA)(mG)(mC)(rU)(rC)(rC)(rC)(rU)(mU)(mU)#(mC)#(mU)#(mC) | |
| CR42- | (mC)#(mU)#(mG)#(mA)(mA)(rC)(rU)(rU)(mG)(mU)(mG)(fG)(mC)(fC) | 277 |
| 152_MCV | (mG)(mU)(mU)(mU)(rA)(rC)(rG)(mU)(rC)(rG)(mG)(rU)(rU)(rG)(mU) | |
| | (mA)(mG)(mC)(rU)(rC)(rC)(rC)(rU)(mU)(mU)#(mC)#(mU)#(mC) | |
| CR42- | (mC)#(mU)#(mG)#(mA)(mA)(rC)(rU)(rU)(mG)(mU)(mG)(mG)(mC)(fC) | 278 |
| 153_MCV | (mG)(mU)(mU)(mU)(rA)(rC)(rG)(mU)(rC)(rG)(mG)(rU)(rU)(rG)(mU) | |
| | (mA)(mG)(mC)(rU)(rC)(rC)(rC)(rU)(mU)(mU)#(mC)#(mU)#(mC) | |
| CR42- | (mC)#(mU)#(mG)#(mA)(mA)(mC)(dU)#(mU)(mG)(mU)(mG)(fG)(mC) | 279 |
| 154_MCV | (fC)(mG)(fU)(mU)(mU)(rA)(rC)(rG)(mU)(rC)(rG)(mG)(rU)(rU)(rG)(mU) | |
| | (mA)(mG)(mC)(rU)(rC)(rC)(rC)(rU)(mU)(mU)#(mC)#(mU)#(mC) | |
| CR42- | (mC)#(mU)#(mG)#(mA)(mA)(mC)(dU)#(mU)(mG)(mU)(mG)(mG)(mC) | 280 |
| 155_MCV | (fC)(mG)(fU)(mU)(mU)(rA)(rC)(rG)(mU)(rC)(rG)(mG)(rU)(rU)(rG)(mU) | |
| | (mA)(mG)(mC)(rU)(rC)(rC)(rC)(rU)(mU)(mU)#(mC)#(mU)#(mC) | |
| CR42- | (mC)#(mU)#(mG)#(mA)(mA)(fC)(dU)#(mU)(mG)(mU)(mG)(fG)(mC) | 281 |
| 156_MCV | (fC)(mG)(fU)(mU)(mU)(rA)(rC)(rG)(mU)(rC)(rG)(mG)(rU)(rU)(rG)(mU) | |
| | (mA)(mG)(mC)(rU)(rC)(rC)(rC)(rU)(mU)(mU)#(mC)#(mU)#(mC) | |
| CR42- | (mC)#(mU)#(mG)#(mA)(mA)(fC)(dU)#(mU)(mG)(mU)(mG)(mG)(mC) | 282 |
| 157_MCV | (fC)(mG)(fU)(mU)(mU)(rA)(rC)(rG)(mU)(rC)(rG)(mG)(rU)(rU)(rG)(mU) | |
| | (mA)(mG)(mC)(rU)(rC)(rC)(rC)(rU)(mU)(mU)#(mC)#(mU)#(mC) | |
| CR42- | (mC)#(mU)#(mG)#(mA)(mA)(mC)(dU)#(mU)(mG)(mU)(mG)(fG)(mC) | 283 |
| 158_MCV | (fC)(mG)(mU)(mU)(mU)(rA)(rC)(rG)(mU)(rC)(rG)(mG)(rU)(rU)(rG)(mU) | |
| | (mA)(mG)(mC)(rU)(rC)(rC)(rC)(rU)(mU)(mU)#(mC)#(mU)#(mC) | |
| CR42- | (mC)#(mU)#(mG)#(mA)(mA)(mC)(dU)#(mU)(mG)(mU)(mG)(mG)(mC) | 284 |
| 159_MCV | (fC)(mG)(mU)(mU)(mU)(rA)(rC)(rG)(mU)(rC)(rG)(mG)(rU)(rU)(rG) | |
| | (mU)(mA)(mG)(mC)(rU)(rC)(rC)(rC)(rU)(mU)(mU)#(mC)#(mU)#(mC) | |
| CR42- | (mC)#(mU)#(mG)#(mA)(mA)(fC)(dU)#(mU)(mG)(mU)(mG)(fG)(mC) | 285 |
| 160_MCV | (fC)(mG)(mU)(mU)(mU)(rA)(rC)(rG)(mU)(rC)(rG)(mG)(rU)(rU)(rG)(mU) | |
| | (mA)(mG)(mC)(rU)(rC)(rC)(rC)(rU)(mU)(mU)#(mC)#(mU)#(mC) | |
| CR42- | (mC)#(mU)#(mG)#(mA)(mA)(fC)(dU)#(mU)(mG)(mU)(mG)(mG)(mC) | 286 |
| 161_MCV | (fC)(mG)(mU)(mU)(mU)(rA)(rC)(rG)(mU)(rC)(rG)(mG)(rU)(rU)(rG)(mU) | |
| | (mA)(mG)(mC)(rU)(rC)(rC)(rC)(rU)(mU)(mU)#(mC)#(mU)#(mC) | |
| CR42- | (mC)#(mU)#(mG)#(mA)(mA)(rC)(rU)(rU)(mG)(mU)(mG)(rG)(mC)(rC) | 287 |
| 162_MCV | (rG)(rU)(rU)(mU)(rA)(fC)(mG)(mU)(rC)(rG)(mG)(rU)(rU)(rG)(mU)(mA) | |
| | (mG)(mC)(rU)(rC)(rC)(rC)(rU)(mU)(mU)#(mC)#(mU)#(mC) | |
| CR42- | (mC)#(mU)#(mG)#(mA)(mA)(rC)(rU)(rU)(mG)(mU)(mG)(rG)(mC)(rC) | 288 |
| 163_MCV | (rG)(rU)(rU)(mU)(rA)(fC)(fG)(mU)(rC)(rG)(mG)(rU)(rU)(rG)(mU)(mA) | |
| | (mG)(mC)(rU)(rC)(rC)(rC)(rU)(mU)(mU)#(mC)#(mU)#(mC) | |
| CR42- | (mC)#(mU)#(mG)#(mA)(mA)(rC)(rU)(rU)(mG)(mU)(mG)(rG)(mC)(rC) | 289 |
| 164_MCV | (rG)(rU)(rU)(mU)(rA)(mC)(mG)(mU)(rC)(rG)(mG)(rU)(rU)(rG)(mU)(mA) | |
| | (mG)(mC)(rU)(rC)(rC)(rC)(rU)(mU)(mU)#(mC)#(mU)#(mC) | |
| CR42- | (mC)#(mU)#(mG)#(mA)(mA)(rC)(rU)(rU)(mG)(mU)(mG)(rG)(mC)(rC) | 290 |
| 165_MCV | (rG)(rU)(rU)(mU)(rA)(mC)(fG)(mU)(rC)(rG)(mG)(rU)(rU)(rG)(mU)(mA) | |
| | (mG)(mC)(rU)(rC)(rC)(rC)(rU)(mU)(mU)#(mC)#(mU)#(mC) | |
| CR42- | (mC)#(mU)#(mG)#(mA)(mA)(rC)(rU)(rU)(mG)(mU)(mG)(rG)(mC)(rC) | 291 |
| 166_MCV | (rG)(rU)(rU)(mU)(rA)(rC)(rG)(mU)(mC)(mG)(mG)(rU)(rU)(rG)(mU)(mA) | |
| | (mG)(mC)(rU)(rC)(rC)(rC)(rU)(mU)(mU)#(mC)#(mU)#(mC) | |
| CR42- | (mC)#(mU)#(mG)#(mA)(mA)(rC)(rU)(rU)(mG)(mU)(mG)(rG)(mC)(rC) | 292 |
| 167_MCV | (rG)(rU)(rU)(mU)(rA)(fC)(mG)(mU)(mC)(mG)(mG)(rU)(rU)(rG)(mU) | |
| | (mA)(mG)(mC)(rU)(rC)(rC)(rC)(rU)(mU)(mU)#(mC)#(mU)#(mC) | |
| CR42- | (mC)#(mU)#(mG)#(mA)(mA)(rC)(rU)(rU)(mG)(mU)(mG)(rG)(mC)(rC) | 293 |
| 168_MCV | (rG)(rU)(rU)(mU)(rA)(fC)(fG)(mU)(mC)(mG)(mG)(rU)(rU)(rG)(mU)(mA) | |
| | (mG)(mC)(rU)(rC)(rC)(rC)(rU)(mU)(mU)#(mC)#(mU)#(mC) | |
| CR42- | (mC)#(mU)#(mG)#(mA)(mA)(rC)(rU)(rU)(mG)(mU)(mG)(rG)(mC)(rC) | 294 |
| 169_MCV | (rG)(rU)(rU)(mU)(rA)(mC)(mG)(mU)(mC)(mG)(mG)(rU)(rU)(rG)(mU) | |
| | (mA)(mG)(mC)(rU)(rC)(rC)(rC)(rU)(mU)(mU)#(mC)#(mU)#(mC) | |
| CR42- | (mC)#(mU)#(mG)#(mA)(mA)(rC)(rU)(rU)(mG)(mU)(mG)(rG)(mC)(rC) | 295 |
| 170_MCV | (rG)(rU)(rU)(mU)(rA)(mC)(fG)(mU)(mC)(mG)(mG)(rU)(rU)(rG)(mU) | |
| | (mA)(mG)(mC)(rU)(rC)(rC)(rC)(rU)(mU)(mU)#(mC)#(mU)#(mC) | |
| CR42- | (mC)#(mU)#(mG)#(mA)(mA)(rC)(rU)(rU)(mG)(mU)(mG)(rG)(mC)(rC) | 296 |
| 171_MCV | (rG)(rU)(rU)(mU)(fA)(rC)(rG)(mU)(mC)(mG)(mG)(rU)(rU)(rG)(mU)(mA) | |
| | (mG)(mC)(rU)(rC)(rC)(rC)(rU)(mU)(mU)#(mC)#(mU)#(mC) | |
| CR42- | (mC)#(mU)#(mG)#(mA)(mA)(rC)(rU)(rU)(mG)(mU)(mG)(rG)(mC)(rC) | 297 |
| 172_MCV | (rG)(rU)(rU)(mU)(dA)#(rC)(rG)(mU)(mC)(mG)(mG)(rU)(rU)(rG)(mU) | |
| | (mA)(mG)(mC)(rU)(rC)(rC)(rC)(rU)(mU)(mU)#(mC)#(mU)#(mC) | |
| CR42- | (mC)#(mU)#(mG)#(mA)(mA)(rC)(rU)(rU)(mG)(mU)(mG)(rG)(mC)(rC) | 298 |
| 173_MCV | (rG)(rU)(rU)(mU)(mA)(rC)(rG)(mU)(mC)(mG)(mG)(rU)(rU)(rG)(mU) | |
| | (mA)(mG)(mC)(rU)(rC)(rC)(rC)(rU)(mU)(mU)#(mC)#(mU)#(mC) | |
| CR42- | (mC)#(mU)#(mG)#(mA)(mA)(rC)(rU)(rU)(mG)(mU)(mG)(rG)(mC)(rC) | 299 |
| 174_MCV | (rG)(rU)(rU)(mU)(rA)#(rC)(rG)(mU)(mC)(mG)(mG)(rU)(rU)(rG)(mU) | |
| | (mA)(mG)(mC)(rU)(rC)(rC)(rC)(rU)(mU)(mU)#(mC)#(mU)#(mC) | |
| CR42- | (mC)#(mU)#(mG)#(mA)(mA)(rC)(rU)(rU)(mG)(mU)(mG)(rG)(mC)(rC) | 300 |
| 175_MCV | (rG)(rU)(rU)(mU)(rA)(rC)(rG)(mU)(rC)(rG)(mG)(rU)#(rU)#(rG)#(mU) | |
| | (mA)(mG)(mC)(rU)(rC)(rC)(rC)(rU)(mU)(mU)#(mC)#(mU)#(mC) | |
| CR42- | (mC)#(mU)#(mG)#(mA)(mA)(rC)(rU)(rU)(mG)(mU)(mG)(rG)(mC)(rC) | 301 |
| 176_MCV | (rG)(rU)(rU)(mU)(rA)(rC)(rG)(mU)(rC)(rG)(mG)(rU)#(rU)#(mG)(mU) | |
| | (mA)(mG)(mC)(rU)(rC)(rC)(rC)(rU)(mU)(mU)#(mC)#(mU)#(mC) | |
| CR42- | (mC)#(mU)#(mG)#(mA)(mA)(rC)(rU)(rU)(mG)(mU)(mG)(rG)(mC)(rC) | 302 |
| 177_MCV | (rG)(rU)(rU)(mU)(rA)(rC)(rG)(mU)(rC)(rG)(mG)(rU)#(rU)(rG)#(mU)(mA) | |
| | (mG)(mC)(rU)(rC)(rC)(rC)(rU)(mU)(mU)#(mC)#(mU)#(mC) | |
| CR42- | (mC)#(mU)#(mG)#(mA)(mA)(rC)(rU)(rU)(mG)(mU)(mG)(rG)(mC)(rC) | 303 |
| 178_MCV | (rG)(rU)(rU)(mU)(rA)(rC)(rG)(mU)(rC)(rG)(mG)(rU)#(rU)(mG)(mU)(mA) | |
| | (mG)(mC)(rU)(rC)(rC)(rC)(rU)(mU)(mU)#(mC)#(mU)#(mC) | |
| CR42- | (mC)#(mU)#(mG)#(mA)(mA)(rC)(rU)(rU)(mG)(mU)(mG)(rG)(mC)(rC) | 304 |
| 179_MCV | (rG)(rU)(rU)(mU)(rA)(rC)(rG)(mU)(rC)(rG)(mG)(rU)(rU)(rG)(mU)(mA) | |
| | (mG)(mC)(rU)#(rC)#(rC)#(rC)(rU)#(mU)(mU)#(mC)#(mU)#(mC) | |
| CR42- | (mC)#(mU)#(mG)#(mA)(mA)(rC)(rU)(rU)(mG)(mU)(mG)(rG)(mC)(rC) | 305 |
| 180_MCV | (rG)(rU)(rU)(mU)(rA)(rC)(rG)(mU)(rC)(rG)(mG)(rU)(rU)(rG)(mU)(mA) | |
| | (mG)(mC)(mU)(rC)#(rC)#(rC)(rU)#(mU)(mU)#(mC)#(mU)#(mC) | |
| CR42- | (mC)#(mU)#(mG)#(mA)(mA)(rC)(rU)(rU)(mG)(mU)(mG)(rG)(mC)(rC) | 306 |
| 181_MCV | (rG)(rU)(rU)(mU)(rA)(rC)(rG)(mU)(rC)(rG)(mG)(rU)(rU)(rG)(mU)(mA) | |
| | (mG)(mC)(rU)#(mC)(rC)#(rC)(rU)#(mU)(mU)#(mC)#(mU)#(mC) | |
| CR42- | (mC)#(mU)#(mG)#(mA)(mA)(rC)(rU)(rU)(mG)(mU)(mG)(rG)(mC)(rC) | 307 |
| 182_MCV | (rG)(rU)(rU)(mU)(rA)(rC)(rG)(mU)(rC)(rG)(mG)(rU)(rU)(rG)(mU)(mA) | |
| | (mG)(mC)(rU)#(rC)#(mC)(rC)(rU)#(mU)(mU)#(mC)#(mU)#(mC) | |
| CR42- | (mC)#(mU)#(mG)#(mA)(mA)(rC)(rU)(rU)(mG)(mU)(mG)(rG)(mC)(rC) | 308 |
| 183_MCV | (rG)(rU)(rU)(mU)(rA)(rC)(rG)(mU)(rC)(rG)(mG)(rU)(rU)(rG)(mU)(mA) | |
| | (mG)(mC)(rU)#(rC)#(rC)(rC)(rU)#(mU)(mU)#(mC)#(mU)#(mC) | |
| CR42- | (mC)#(mU)#(mG)#(mA)(mA)(rC)(rU)(rU)(mG)(mU)(mG)(rG)(mC)(rC) | 309 |
| 184_MCV | (rG)(rU)(rU)(mU)(rA)(rC)(rG)(mU)(rC)(rG)(mG)(rU)(rU)(rG)(mU)(mA) | |
| | (mG)(mC)(mU)(rC)#(rC)(rC)(rU)#(mU)(mU)#(mC)#(mU)#(mC) | |
| CR42- | (mC)#(mU)#(mG)#(mA)(mA)(rC)(rU)(rU)(mG)(mU)(mG)(rG)(mC)(rC) | 310 |
| 185_MCV | (rG)(rU)(rU)(mU)(rA)(rC)(rG)(mU)(rC)(rG)(mG)(rU)(rU)(rG)(mU)(mA) | |
| | (mG)(mC)(rU)#(mC)(rC)(rC)(rU)#(mU)(mU)#(mC)#(mU)#(mC) | |
| CR42- | (mC)#(mU)#(mG)#(mA)(mA)(rC)(rU)(rU)(mG)(mU)(mG)(rG)(mC)(rC) | 311 |
| 186_MCV | (rG)(rU)(rU)(mU)(rA)(rC)(rG)(mU)(rC)(rG)(mG)(rU)(rU)(rG)(mU)(mA) | |
| | (mG)(mC)(rU)#(rC)(rC)#(rC)(rU)#(mU)(mU)#(mC)#(mU)#(mC) | |
| CR42- | (mC)#(mU)#(mG)#(mA)(mA)(rC)(rU)(rU)(mG)(mU)(mG)(rG)(mC)(rC) | 312 |
| 187_MCV | (rG)(rU)(rU)(mU)(rA)(rC)(rG)(mU)(rC)(rG)(mG)(rU)(rU)(rG)(mU)(mA) | |
| | (mG)(mC)(rU)#(rC)(mC)(rC)(rU)#(mU)(mU)#(mC)#(mU)#(mC) | |
| CR42- | (mC)#(mU)#(mG)#(mA)(mA)(rC)(rU)(rU)(mG)(mU)(mG)(rG)(mC)(rC) | 304 |
| 188_MCV | (rG)(rU)(rU)(mU)(rA)(rC)(rG)(mU)(rC)(rG)(mG)(rU)(rU)(rG)(mU)(mA) | |
| | (mG)(mC)(rU)#(rC)#(rC)#(rC)(rU)#(mU)(mU)#(mC)#(mU)#(mC) | |
| CR42- | (mC)#(mU)#(mG)#(mA)(mA)(rC)(rU)(rU)(mG)(mU)(mG)(rG)(mC)(rC) | 313 |
| 189_MCV | (rG)(rU)(rU)(mU)(rA)(rC)(rG)(mU)(rC)(rG)(mG)(rU)#(rU)(rG)(mU)(mA) | |
| | (mG)(mC)(rU)#(rC)#(rC)#(rC)(rU)#(mU)(mU)#(mC)#(mU)#(mC) | |
| CR48- | (mC)#(mU)#(mG)#(rA)(rA)(rC)(rU)(rU)(rG)(rU)(rG)(rG)(rC)(rC)(rG)(rU) | 314 |
| 0_MCV | (rU)(rU)(rA)(rC)(rG)(rU)(rC)(rG)(rG)(rU)(rU)(rG)(rU)(rA)(rG)(rC)(rU) | |
| | (rC)(rC)(rC)(rU)(rU)(rU)(rC)(rU)(rC)(rA)(rU)(rU)#(mU)#(mC)#(mG) | |
| CR48- | (mC)#(mU)#(mG)#(mA)(mA)(rC)(rU)(rU)(rG)(rU)(rG)(rG)(rC)(rC)(rG) | 315 |
| 2_MCV | (rU)(rU)(rU)(rA)(rC)(rG)(rU)(rC)(rG)(rG)(rU)(rU)(rG)(rU)(rA)(rG)(rC) | |
| | (rU)(rC)(rC)(rC)(rU)(mU)(mU)(mC)(mU)(mC)(mA)(mU)(mU)#(mU)#(mC)# | |
| | (mG) | |
| CR48- | (mC)#(mU)#(mG)#(mA)(mA)(rC)(rU)(rU)(mG)(mU)(mG)(rG)(mC)(rC) | 316 |
| 4_MCV | (rG)(rU)(rU)(mU)(rA)(rC)(rG)(mU)(rC)(rG)(mG)(rU)(rU)(rG)(mU)(mA) | |
| | (mG)(mC)(rU)(rC)(rC)(rC)(rU)(mU)(mU)(mC)(mU)(mC)(mA)(mU)(mU) | |
| | #(mU)#(mC)#(mG) | |
| CR48- | (mC)#(mU)#(mG)#(mA)(mA)(mC)(dT)#(mU)(mG)(mU)(mG)(rG)(mC) | 317 |
| 128_MCV | (rC)(rG)(rU)(rU)(mU)(rA)(rC)(rG)(mU)(rC)(rG)(mG)(rU)(rU)(rG)(mU) | |
| | (mA)(mG)(mC)(rU)(rC)(rC)(rC)(rU)(mU)(mU)(mC)(mU)(mC)(mA)(mU) | |
| | (mU)#(mU)#(mC)#(mG) | |
| CR48- | (mC)#(mU)#(mG)#(mA)(mA)(rC)(rU)(rU)(mG)(mU)(mG)(rG)(mC)(fC) | 318 |
| 140_MCV | (mG)(fU)(mU)(mU)(rA)(rC)(rG)(mU)(rC)(rG)(mG)(rU)(rU)(rG)(mU) | |
| | (mA)(mG)(mC)(rU)(rC)(rC)(rC)(rU)(mU)(mU)(mC)(mU)(mC)(mA)(mU) | |
| | (mU#(mU)#(mC)#(mG) | |
| CR48- | (mC)#(mU)#(mG)#(mA)(mA)(mC)(dT)#(mU)(mG)(mU)(mG)(rG)(mC) | 319 |
| 142_MCV | (fC)(mG)(fU)(mU)(mU)(rA)(rC)(rG)(mU)(rC)(rG)(mG)(rU)(rU)(rG)(mU) | |
| | (mA)(mG)(mC)(rU)(rC)(rC)(rC)(rU)(mU)(mU)(mC)(mU)(mC)(mA)(mU) | |
| | (mU)#(mU)#(mC)#(mG) | |
| CR48- | (mC)#(mU)#(mG)#(mA)(mA)(mC)(dT)#(mU)(mG)(mU)(mG)(mG)(mC) | 320 |
| 155_MCV | (fC)(mG)(fU)(mU)(mU)(rA)(rC)(rG)(mU)(rC)(rG)(mG)(rU)(rU)(rG)(mU) | |
| | (mA)(mG)(mC)(rU)(rC)(rC)(rC)(rU)(mU)(mU)(mC)(mU)(mC)(mA)(mU) | |
| | (mU)#(mU)#(mC)#(mG) | |
| CR48- | (mC)#(mU)#(mG)#(mA)(mA)(rC)(rU)(rU)(mG)(mU)(mG)(rG)(mC)(rC) | 321 |
| 165_MCV | (rG)(rU)(rU)(mU)(rA)(mC)(fG)(mU)(rC)(rG)(mG)(rU)(rU)(rG)(mU)(mA) | |
| | (mG)(mC)(rU)(rC)(rC)(rC)(rU)(mU)(mU)(mC)(mU)(mC)(mA)(mU)(mU) | |
| | #(mU)#(mC)#(mG) | |
| CR48- | (mC)#(mU)#(mG)#(mA)(mA)(rC)(rU)(rU)(mG)(mU)(mG)(rG)(mC)(rC) | 322 |
| 170_MCV | (rG)(rU)(rU)(mU)(rA)(mC)(fG)(mU)(mC)(mG)(mG)(rU)(rU)(rG)(mU)(mA) | |
| | (mG)(mC)(rU)(rC)(rC)(rC)(rU)(mU)(mU)(mC)(mU)(mC)(mA)(mU)(mU) | |
| | #(mU)#(mC)#(mG) | |
| CR48- | (mC)#(mU)#(mG)#(mA)(mA)(rC)(rU)(rU)(mG)(mU)(mG)(rG)(mC)(rC) | 323 |
| 177_MCV | (rG)(rU)(rU)(mU)(rA)(rC)(rG)(mU)(rC)(rG)(mG)(rU)#(rU)(rG)#(mU)(mA) | |
| | (mG)(mC)(rU)(rC)(rC)(rC)(rU)(mU)(mU)(mC)(mU)(mC)(mA)(mU)(mU) | |
| | #(mU)#(mC)#(mG) | |
| CR48- | (mC)#(mU)#(mG)#(mA)(mA)(rC)(rU)(rU)(mG)(mU)(mG)(rG)(mC)(rC) | 324 |
| 186_MCV | (rG)(rU)(rU)(mU)(rA)(rC)(rG)(mU)(rC)(rG)(mG)(rU)(rU)(rG)(mU)(mA) | |
| | (mG)(mC)(rU)#(rC)(rC)#(rC)(rU)#(mU)(mU)(mC)(mU)(mC)(mA)(mU) | |
| | (mU)#(mU)#(mC)#(mG) | |
| CR48- | (mC)#(mU)#(mG)#(mA)(mA)(rC)(rU)(rU)(mG)(mU)(mG)(rG)(mC)(rC) | 325 |
| 189_MCV | (rG)(rU)(rU)(mU)(rA)(rC)(rG)(mU)(rC)(rG)(mG)(rU)#(rU)(rG)(mU)(mA) | |
| | (mG)(mC)(rU)#(rC)#(rC)#(rC)(rU)#(mU)(mU)(mC)(mU)(mC)(mA)(mU) | |
| | (mU)#(mU)#(mC)#(mG) | |
| CR48- | (mC)#(mU)#(mG)#(mA)(mA)(mC)(dT)#(mU)(mG)(mU)(mG)(fG)(mC) | 326 |
| 154_MCV | (fC)(mG)(fU)(mU)(mU)(rA)(rC)(rG)(mU)(rC)(rG)(mG)(rU)(rU)(rG)(mU) | |
| | (mA)(mG)(mC)(rU)(rC)(rC)(rC)(rU)(mU)(mU)(mC)(mU)(mC)(mA)(mU) | |
| | (mU)#(mU)#(mC)#(mG) | |
| CR48- | (mC)#(mU)#(mG)#(mA)(mA)(mC)(dT)#(mU)(mG)(mU)(mG)(fG)(mC) | 327 |
| 190_MCV | (fC)(mG)(fU)(mU)(mU)(rA)(fC)(mG)(mU)(mC)(mG)(mG)(rU)(rU)(rG) | |
| | (mU)(mA)(mG)(mC)(rU)(rC)(rC)(rC)(rU)(mU)(mU)(mC)(mU)(mC)(mA) | |
| | (mU)(mU)#(mU)#(mC)#(mG) | |
| CR48- | (mC)#(mU)#(mG)#(mA)(mA)(mC)(dT)#(mU)(mG)(mU)(mG)(fG)(mC) | 328 |
| 191_MCV | (fC)(mG)(fU)(mU)(mU)(rA)(mC)(fG)(mU)(mC)(mG)(mG)(rU)(rU)(rG) | |
| | (mU)(mA)(mG)(mC)(rU)(rC)(rC)(rC)(rU)(mU)(mU)(mC)(mU)(mC)(mA) | |
| | (mU)(mU)#(mU)#(mC)#(mG) | |
| CR48- | (mC)#(mU)#(mG)#(mA)(mA)(mC)(dT)#(mU)(mG)(mU)(mG)(mG)(mC) | 329 |
| 192_MCV | (fC)(mG)(fU)(mU)(mU)(rA)(fC)(mG)(mU)(mC)(mG)(mG)(rU)(rU)(rG) | |
| | (mU)(mA)(mG)(mC)(rU)(rC)(rC)(rC)(rU)(mU)(mU)(mC)(mU)(mC)(mA) | |
| | (mU)(mU)#(mU)#(mC)#(mG) | |
| CR48- | (mC)#(mU)#(mG)#(mA)(mA)(mC)(dT)#(mU)(mG)(mU)(mG)(mG)(mC) | 330 |
| 193_MCV | (fC)(mG)(fU)(mU)(mU)(rA)(mC)(fG)(mU)(mC)(mG)(mG)(rU)(rU)(rG) | |
| | (mU)(mA)(mG)(mC)(rU)(rC)(rC)(rC)(rU)(mU)(mU)(mC)(mU)(mC)(mA) | |
| | (mU)(mU)#(mU)#(mC)#(mG) | |
| CR48- | (mC)#(mU)#(mG)#(mA)(mA)(mC)(dT)#(mU)(mG)(mU)(mG)(fG)(mC) | 331 |
| 194_MCV | (fC)(mG)(fU)(mU)(mU)(rA)#(fC)(mG)(mU)(mC)(mG)(mG)(rU)(rU)(rG) | |
| | (mU)(mA)(mG)(mC)(rU)(rC)(rC)(rC)(rU)(mU)(mU)(mC)(mU)(mC)(mA) | |
| | (mU)(mU)#(mU)#(mC)#(mG) | |
| CR48- | (mC)#(mU)#(mG)#(mA)(mA)(mC)(dT)#(mU)(mG)(mU)(mG)(fG)(mC) | 332 |
| 195_MCV | (fC)(mG)(fU)(mU)(mU)(rA)#(mC)(fG)(mU)(mC)(mG)(mG)(rU)(rU)(rG) | |
| | (mU)(mA)(mG)(mC)(rU)(rC)(rC)(rC)(rU)(mU)(mU)(mC)(mU)(mC)(mA) | |
| | (mU)(mU)#(mU)#(mC)#(mG) | |
| CR48- | (mC)#(mU)#(mG)#(mA)(mA)(mC)(dT)#(mU)(mG)(mU)(mG)(mG)(mC) | 333 |
| 196_MCV | (fC)(mG)(fU)(mU)(mU)(rA)#(fC)(mG)(mU)(mC)(mG)(mG)(rU)(rU)(rG) | |
| | (mU)(mA)(mG)(mC)(rU)(rC)(rC)(rC)(rU)(mU)(mU)(mC)(mU)(mC)(mA) | |
| | (mU)(mU)#(mU)#(mC)#(mG) | |
| CR48- | (mC)#(mU)#(mG)#(mA)(mA)(mC)(dT)#(mU)(mG)(mU)(mG)(mG)(mC) | 334 |
| 197_MCV | (fC)(mG)(fU)(mU)(mU)(rA)#(mC)(fG)(mU)(mC)(mG)(mG)(rU)(rU)(rG) | |
| | (mU)(mA)(mG)(mC)(rU)(rC)(rC)(rC)(rU)(mU)(mU)(mC)(mU)(mC)(mA) | |
| | (mU)(mU)#(mU)#(mC)#(mG) | |
| CR48- | (mC)#(mU)#(mG)#(mA)(mA)(mC)(dT)#(mU)(mG)(mU)(mG)(fG)(mC) | 335 |
| 198_MCV | (fC)(mG)(fU)(mU)(mU)(mA)(fC)(mG)(mU)(mC)(mG)(mG)(rU)(rU)(rG) | |
| | (mU)(mA)(mG)(mC)(rU)(rC)(rC)(rC)(rU)(mU)(mU)(mC)(mU)(mC)(mA) | |
| | (mU)(mU)#(mU)#(mC)#(mG) | |
| CR48- | (mC)#(mU)#(mG)#(mA)(mA)(mC)(dT)#(mU)(mG)(mU)(mG)(fG)(mC) | 336 |
| 199_MCV | (fC)(mG)(fU)(mU)(mU)(mA)(mC)(fG)(mU)(mC)(mG)(mG)(rU)(rU)(rG) | |
| | (mU)(mA)(mG)(mC)(rU)(rC)(rC)(rC)(rU)(mU)(mU)(mC)(mU)(mC)(mA) | |
| | (mU)(mU)#(mU)#(mC)#(mG) | |
| CR48- | (mC)#(mU)#(mG)#(mA)(mA)(mC)(dT)#(mU)(mG)(mU)(mG)(mG)(mC) | 337 |
| 200_MCV | (fC)(mG)(fU)(mU)(mU)(mA)(fC)(mG)(mU)(mC)(mG)(mG)(rU)(rU)(rG) | |
| | (mU)(mA)(mG)(mC)(rU)(rC)(rC)(rC)(rU)(mU)(mU)(mC)(mU)(mC)(mA) | |
| | (mU)(mU)#(mU)#(mC)#(mG) | |
| CR48- | (mC)#(mU)#(mG)#(mA)(mA)(mC)(dT)#(mU)(mG)(mU)(mG)(mG)(mC) | 338 |
| 201_MCV | (fC)(mG)(fU)(mU)(mU)(mA)(mC)(fG)(mU)(mC)(mG)(mG)(rU)(rU)(rG) | |
| | (mU)(mA)(mG)(mC)(rU)(rC)(rC)(rC)(rU)(mU)(mU)(mC)(mU)(mC)(mA) | |
| | (mU)(mU)#(mU)#(mC)#(mG) | |
| CR48- | (mC)#(mU)#(mG)#(mA)(mA)(mC)(dT)#(mU)(mG)(mU)(mG)(fG)(mC) | 339 |
| 202_MCV | (fC)(mG)(fU)(mU)(mU)(fA)(fC)(mG)(mU)(mC)(mG)(mG)(rU)(rU)(rG) | |
| | (mU)(mA)(mG)(mC)(rU)(rC)(rC)(rC)(rU)(mU)(mU)(mC)(mU)(mC)(mA) | |
| | (mU)(mU)#(mU)#(mC)#(mG) | |
| CR48- | (mC)#(mU)#(mG)#(mA)(mA)(mC)(dT)#(mU)(mG)(mU)(mG)(fG)(mC) | 340 |
| 203_MCV | (fC)(mG)(fU)(mU)(mU)(fA)(mC)(fG)(mU)(mC)(mG)(mG)(rU)(rU)(rG) | |
| | (mU)(mA)(mG)(mC)(rU)(rC)(rC)(rC)(rU)(mU)(mU)(mC)(mU)(mC)(mA) | |
| | (mU)(mU)#(mU)#(mC)#(mG) | |
| CR48- | (mC)#(mU)#(mG)#(mA)(mA)(mC)(dT)#(mU)(mG)(mU)(mG)(mG)(mC) | 341 |
| 204_MCV | (fC)(mG)(fU)(mU)(mU)(fA)(fC)(mG)(mU)(mC)(mG)(mG)(rU)(rU)(rG) | |
| | (mU)(mA)(mG)(mC)(rU)(rC)(rC)(rC)(rU)(mU)(mU)(mC)(mU)(mC)(mA) | |
| | (mU)(mU)#(mU)#(mC)#(mG) | |
| CR48- | (mC)#(mU)#(mG)#(mA)(mA)(mC)(dT)#(mU)(mG)(mU)(mG)(mG)(mC) | 342 |
| 205_MCV | (fC)(mG)(fU)(mU)(mU)(fA)(mC)(fG)(mU)(mC)(mG)(mG)(rU)(rU)(rG) | |
| | (mU)(mA)(mG)(mC)(rU)(rC)(rC)(rC)(rU)(mU)(mU)(mC)(mU)(mC)(mA) | |
| | (mU)(mU)#(mU)#(mC)#(mG) | |
| CR48- | (mC)#(mU)#(mG)#(mA)(mA)(mC)(dT)#(mU)(mG)(mU)(mG)(mG)(mC) | 343 |
| 206_MCV | (fC)(mG)(fU)(mU)(mU)(rA)(rC)(rG)(mU)(rC)(rG)(mG)(rU)(rU)(mG) | |
| | (mU)(mA)(mG)(mC)(rU)(rC)(mC)(rC)(rU)(mU)(mU)(mC)(mU)(mC)(mA) | |
| | (mU)(mU)#(mU)#(mC)#(mG) | |
| CR48- | (mC)#(mU)#(mG)#(mA)(mA)(mC)(dT)#(mU)(mG)(mU)(mG)(mG)(mC) | 344 |
| 207_MCV | (fC)(mG)(fU)(mU)(mU)(rA)(rC)(rG)(mU)(rC)(rG)(mG)(rU)(rU)(mG) | |
| | (mU)(mA)(mG)(mC)(rU)(rC)(rC)(mC)(rU)(mU)(mU)(mC)(mU)(mC)(mA) | |
| | (mU)(mU)#(mU)#(mC)#(mG) | |
| CR48- | (mC)#(mU)#(mG)#(mA)(mA)(mC)(dT)#(mU)(mG)(mU)(mG)(mG)(mC) | 345 |
| 208_MCV | (fC)(mG)(fU)(mU)(mU)(rA)(rC)(rG)(mU)(rC)(rG)(mG)(rU)(rU)(rG)(mU) | |
| | (mA)(mG)(mC)(rU)(rC)(mC)(mC)(rU)(mU)(mU)(mC)(mU)(mC)(mA) | |
| | (mU)(mU)#(mU)#(mC)#(mG) | |
| CR48- | (mC)#(mU)#(mG)#(mA)(mA)(mC)(dT)#(mU)(mG)(mU)(mG)(mG)(mC) | 346 |
| 209_MCV | (fC)(mG)(fU)(mU)(mU)(rA)(rC)(rG)(mU)(rC)(rG)(mG)(rU)(rU)(mG) | |
| | (mU)(mA)(mG)(mC)(rU)(rC)(mC)(mC)(rU)(mU)(mU)(mC)(mU)(mC)(mA) | |
| | (mU)(mU)#(mU)#(mC)#(mG) | |
| CR48- | (mC)#(mU)#(mG)#(mA)(mA)(mC)(dT)#(mU)(mG)(mU)(mG)(mG)(mC) | 347 |
| 210_MCV | (fC)(mG)(fU)(mU)(mU)(rA)(rC)(rG)(mU)(rC)(rG)(mG)(rU)#(rU)(mG) | |
| | (mU)(mA)(mG)(mC)(rU)#(rC)(mC)(rC)(rU)#(mU)(mU)(mC)(mU)(mC) | |
| | (mA)(mU)(mU)#(mU)#(mC)#(mG) | |
| CR48- | (mC)#(mU)#(mG)#(mA)(mA)(mC)(dT)#(mU)(mG)(mU)(mG)(mG)(mC) | 348 |
| 211_MCV | (fC)(mG)(fU)(mU)(mU)(rA)(rC)(rG)(mU)(rC)(rG)(mG)(rU)#(rU)(mG) | |
| | (mU)(mA)(mG)(mC)(rU)#(rC)#(mC)(rC)(rU)#(mU)(mU)(mC)(mU)(mC) | |
| | (mA)(mU)(mU)#(mU)#(mC)#(mG) | |
| CR48- | (mC)#(mU)#(mG)#(mA)(mA)(mC)(dT)#(mU)(mG)(mU)(mG)(mG)(mC) | 349 |
| 212_MCV | (fC)(mG)(fU)(mU)(mU)(rA)(rC)(rG)(mU)(rC)(rG)(mG)(rU)#(rU)(mG) | |
| | (mU)(mA)(mG)(mC)(rU)#(rC)#(mC)(mC)(rU)#(mU)(mU)(mC)(mU)(mC) | |
| | (mA)(mU)(mU)#(mU)#(mC)#(mG) | |
| CR48- | (mC)#(mU)#(mG)#(mA)(mA)(mC)(dT)#(mU)(mG)(mU)(mG)(mG)(mC) | 350 |
| 213_MCV | (fC)(mG)(fU)(mU)(mU)(rA)(rC)(rG)(mU)(rC)(rG)(mG)(dT)#(rU)(mG) | |
| | (mU)(mA)(mG)(mC)(rU)(rC)(rC)(rC)(rU)(mU)(mU)(mC)(mU)(mC)(mA) | |
| | (mU)(mU)#(mU)#(mC)#(mG) | |
| CR48- | (mC)#(mU)#(mG)#(mA)(mA)(mC)(dT)#(mU)(mG)(mU)(mG)(mG)(mC) | 351 |
| 214_MCV | (fC)(mG)(fU)(mU)(mU)(rA)(rC)(rG)(mU)(rC)(rG)(mG)(dT)#(rU)(mG) | |
| | (mU)(mA)(mG)(mC)(rU)(rC)(mC)(rC)(rU)(mU)(mU)(mC)(mU)(mC)(mA) | |
| | (mU)(mU)#(mU)#(mC)#(mG) | |
| CR48- | (mC)#(mU)#(mG)#(mA)(mA)(mC)(dT)#(mU)(mG)(mU)(mG)(mG)(mC) | 352 |
| 215_MCV | (fC)(mG)(fU)(mU)(mU)(rA)(rC)(rG)(mU)(rC)(rG)(mG)(dT)#(rU)(mG) | |
| | (mU)(mA)(mG)(mC)(rU)(rC)(rC)(mC)(rU)(mU)(mU)(mC)(mU)(mC)(mA) | |
| | (mU)(mU)#(mU)#(mC)#(mG) | |
| CR48- | (mC)#(mU)#(mG)#(mA)(mA)(mC)(dT)#(mU)(mG)(mU)(mG)(mG)(mC) | 353 |
| 216_MCV | (fC)(mG)(fU)(mU)(mU)(rA)(rC)(rG)(mU)(rC)(rG)(mG)(dT)#(rU)(mG) | |
| | (mU)(mA)(mG)(mC)(rU)(rC)(mC)(mC)(rU)(mU)(mU)(mC)(mU)(mC)(mA) | |
| | (mU)(mU)#(mU)#(mC)#(mG) | |
| CR48- | (mC)#(mU)#(mG)#(mA)(mA)(mC)(dT)#(mU)(mG)(mU)(mG)(mG)(mC) | 354 |
| 217_MCV | (fC)(mG)(fU)(mU)(mU)(rA)(rC)(rG)(mU)(rC)(rG)(mG)(rU)(rU)(rG)(mU) | |
| | (mA)(mG)(mC)(dT)#(rC)(rC)(rC)(rU)(mU)(mU)(mC)(mU)(mC)(mA)(mU) | |
| | (mU)#(mU)#(mC)#(mG) | |
| CR48- | (mC)#(mU)#(mG)#(mA)(mA)(mC)(dT)#(mU)(mG)(mU)(mG)(mG)(mC) | 355 |
| 218_MCV | (fC)(mG)(fU)(mU)(mU)(rA)(rC)(rG)(mU)(rC)(rG)(mG)(rU)(rU)(rG)(mU) | |
| | (mA)(mG)(mC)(rU)(dC)#(rC)(rC)(rU)(mU)(mU)(mC)(mU)(mC)(mA)(mU) | |
| | (mU)#(mU)#(mC)#(mG) | |
| CR48- | (mC)#(mU)#(mG)#(mA)(mA)(mC)(dT)#(mU)(mG)(mU)(mG)(mG)(mC) | 356 |
| 219_MCV | (fC)(mG)(fU)(mU)(mU)(rA)(rC)(rG)(mU)(rC)(rG)(mG)(rU)(rU)(rG)(mU) | |
| | (mA)(mG)(mC)(rU)(rC)(dC)#(rC)(rU)(mU)(mU)(mC)(mU)(mC)(mA)(mU) | |
| | (mU)#(mU)#(mC)#(mG) | |
| CR48- | (mC)#(mU)#(mG)#(mA)(mA)(mC)(dT)#(mU)(mG)(mU)(mG)(mG)(mC) | 357 |
| 220_MCV | (fC)(mG)(fU)(mU)(mU)(rA)(rC)(rG)(mU)(rC)(rG)(mG)(rU)(rU)(rG)(mU) | |
| | (mA)(mG)(mC)(rU)(rC)(rC)(dC)#(rU)(mU)(mU)(mC)(mU)(mC)(mA)(mU) | |
| | (mU)#(mU)#(mC)#(mG) | |
| CR48- | (mC)#(mU)#(mG)#(mA)(mA)(mC)(dT)#(mU)(mG)(mU)(mG)(mG)(mC) | 358 |
| 221_MCV | (fC)(mG)(fU)(mU)(mU)(rA)(rC)(rG)(mU)(rC)(rG)(mG)(rU)(rU)(rG)(mU) | |
| | (mA)(mG)(mC)(rU)(rC)(rC)(rC)(dT)#(mU)(mU)(mC)(mU)(mC)(mA)(mU) | |
| | (mU)#(mU)#(mC)#(mG) | |
| CR48- | (mC)#(mU)#(mG)#(mA)(mA)(mC)(dT)#(mU)(mG)(mU)(mG)(mG)(mC) | 359 |
| 222_MCV | (fC)(mG)(fU)(mU)(mU)(rA)(rC)(rG)(mU)(rC)(rG)(mG)(rU)(rU)(rG)(mU) | |
| | (mA)(mG)(mC)(dT)#(rC)(dC)#(rC)(dT)#(mU)(mU)(mC)(mU)(mC)(mA) | |
| | (mU)(mU)#(mU)#(mC)#(mG) | |
| CR48- | (mC)#(mU)#(mG)#(mA)(mA)(mC)(dT)#(mU)(mG)(mU)(mG)(mG)(mC) | 360 |
| 223_MCV | (fC)(mG)(fU)(mU)(mU)(rA)(rC)(rG)(mU)(rC)(rG)(mG)(dT)#(rU)(rG)(mU) | |
| | (mA)(mG)(mC)(dT)#(dC)#(dC)#(rC)(dT)#(mU)(mU)(mC)(mU)(mC)(mA) | |
| | (mU)(mU)#(mU)#(mC)#(mG) | |
| CR48- | (mC)#(mU)#(mG)#(mA)(mA)(mC)(dT)#(mU)(mG)(mU)(mG)(mG)(mC) | 361 |
| 224_MCV | (fC)(mG)(fU)(mU)(mU)(rA)(rC)(rG)(mU)(rC)(rG)(mG)(dT)#(rU)(mG) | |
| | (mU)(mA)(mG)(mC)(dT)#(rC)(mC)(rC)(dT)#(mU)(mU)(mC)(mU)(mC)(mA) | |
| | (mU)(mU)#(mU)#(mC)#(mG) | |
| CR48- | (mC)#(mU)#(mG)#(mA)(mA)(mC)(dT)#(mU)(mG)(mU)(mG)(mG)(mC) | 362 |
| 225_MCV | (fC)(mG)(fU)(mU)(mU)(rA)(rC)(rG)(mU)(rC)(rG)(mG)(dT)#(rU)(mG) | |
| | (mU)(mA)(mG)(mC)(dT)#(rC)(dC)#(mC)(dT)#(mU)(mU)(mC)(mU)(mC) | |
| | (mA)(mU)(mU)#(mU)#(mC)#(mG) | |
| CR48- | (mC)#(mU)#(mG)#(mA)(mA)(mC)(dT)#(mU)(mG)(mU)(mG)(mG)(mC) | 363 |
| 226_MCV | (fC)(mG)(fU)(mU)(mU)(rA)(rC)(rG)(mU)(rC)(rG)(mG)(dT)#(rU)(mG) | |
| | (mU)(mA)(mG)(mC)(dT)#(rC)(mC)(mC)(dT)#(mU)(mU)(mC)(mU)(mC) | |
| | (mA)(mU)(mU)#(mU)#(mC)#(mG) | |
| CR48- | (mC)#(mU)#(mG)#(mA)(mA)(mC)(dT)#(mU)(mG)(mU)(mG)(mG)(mC) | 364 |
| 227_MCV | (fC)(mG)(fU)(mU)(mU)(rA)(rC)(rG)(mU)(rC)(rG)(mG)(dT)#(rU)(mG) | |
| | (mU)(mA)(mG)(mC)(dT)#(dC)#(mC)(mC)(dT)#(mU)(mU)(mC)(mU)(mC) | |
| | (mA)(mU)(mU)#(mU)#(mC)#(mG) | |
| CR48- | (mC)#(mU)#(mG)#(mA)(mA)(mC)(dT)#(mU)(mG)(mU)(mG)(fG)(mC) | 365 |
| 228_MCV | (fC)(mG)(fU)(mU)(mU)(rA)#(fC)(mG)(mU)(mC)(mG)(mG)(rU)#(rU)(mG) | |
| | (mU)(mA)(mG)(mC)(rU)#(rC)(rC)#(rC)(rU)#(mU)(mU)(mC)(mU)(mC) | |
| | (mA)(mU)(mU)#(mU)#(mC)#(mG) | |
| CR48- | (mC)#(mU)#(mG)#(mA)(mA)(mC)(dT)#(mU)(mG)(mU)(mG)(fG)(mC) | 366 |
| 229_MCV | (fC)(mG)(fU)(mU)(mU)(rA)#(mC)(fG)(mU)(mC)(mG)(mG)(rU)#(rU)(mG) | |
| | (mU)(mA)(mG)(mC)(rU)#(rC)(rC)#(rC)(rU)#(mU)(mU)(mC)(mU)(mC) | |
| | (mA)(mU)(mU)#(mU)#(mC)#(mG) | |
| CR48- | (mC)#(mU)#(mG)#(mA)(mA)(mC)(dT)#(mU)(mG)(mU)(mG)(mG)(mC) | 367 |
| 230_M | (fC)(mG)(fU)(mU)(mU)(rA)#(fC)(mG)(mU)(mC)(mG)(mG)(rU)#(rU) | |
| | (mG)(mU)(mA)(mG)(mC)(rU)#(rC)(rC)#(rC)(rU)#(mU)(mU)(mC)(mU)(mC) | |
| | (mA)(mU)(mU)#(mU)#(mC)#(mG) | |
| CR48- | (mC)#(mU)#(mG)#(mA)(mA)(mC)(dT)#(mU)(mG)(mU)(mG)(mG)(mC) | 368 |
| 231_MCV | (fC)(mG)(fU)(mU)(mU)(rA)#(mC)(fG)(mU)(mC)(mG)(mG)(rU)#(rU) | |
| | (mG)(mU)(mA)(mG)(mC)(rU)#(rC)(rC)#(rC)(rU)#(mU)(mU)(mC)(mU)(mC) | |
| | (mA)(mU)(mU)#(mU)#(mC)#(mG) | |
| CR48- | (mC)#(mU)#(mG)#(mA)(mA)(mC)(dT)#(mU)(mG)(mU)(mG)(fG)(mC) | 369 |
| 232_MCV | (fC)(mG)(fU)(mU)(mU)(rA)#(fC)(mG)(mU)(mC)(mG)(mG)(rU)#(rU)(mG) | |
| | (mU)(mA)(mG)(mC)(rU)#(rC)(mC)(rC)(rU)#(mU)(mU)(mC)(mU)(mC) | |
| | (mA)(mU)(mU)#(mU)#(mC)#(mG) | |
| CR48- | (mC)#(mU)#(mG)#(mA)(mA)(mC)(dT)#(mU)(mG)(mU)(mG)(fG)(mC) | 370 |
| 233_MCV | (fC)(mG)(fU)(mU)(mU)(rA)#(mC)(fG)(mU)(mC)(mG)(mG)(rU)#(rU)(mG) | |
| | (mU)(mA)(mG)(mC)(rU)#(rC)(mC)(rC)(rU)#(mU)(mU)(mC)(mU)(mC) | |
| | (mA)(mU)(mU)#(mU)#(mC)#(mG) | |
| CR48- | (mC)#(mU)#(mG)#(mA)(mA)(mC)(dT)#(mU)(mG)(mU)(mG)(mG)(mC) | 371 |
| 234_MCV | (fC)(mG)(fU)(mU)(mU)(rA)#(fC)(mG)(mU)(mC)(mG)(mG)(rU)#(rU) | |
| | (mG)(mU)(mA)(mG)(mC)(rU)#(rC)(mC)(rC)(rU)#(mU)(mU)(mC)(mU)(mC) | |
| | (mA)(mU)(mU)#(mU)#(mC)#(mG) | |
| CR48- | (mC)#(mU)#(mG)#(mA)(mA)(mC)(dT)#(mU)(mG)(mU)(mG)(mG)(mC) | 372 |
| 235_MCV | (fC)(mG)(fU)(mU)(mU)(rA)#(mC)(fG)(mU)(mC)(mG)(mG)(rU)#(rU)(mG) | |
| | (mU)(mA)(mG)(mC)(rU)#(rC)(mC)(rC)(rU)#(mU)(mU)(mC)(mU)(mC) | |
| | (mA)(mU)(mU)#(mU)#(mC)#(mG) | |
| CR48- | (mC)#(mU)#(mG)#(mA)(mA)(mC)(dT)#(mU)(mG)(mU)(mG)(mG)(mC) | 373 |
| 236_MCV | (fC)(mG)(fU)(mU)(mU)(rA)#(mC)(fG)(mU)(mC)(mG)(mG)(rU)#(rU)# | |
| | (mG)(mU)(mA)(mG)(mC)(rU)#(rC)#(mC)(rC)#(rU)#(mU)(mU)(mC)(mU) | |
| | (mC)(mA)(mU)(mU)#(mU)#(mC)#(mG) | |
| CR48- | (mC)#(mU)#(mG)#(mA)(mA)(mC)(dT)#(mU)(mG)(mU)(mG)(fG)(mC) | 374 |
| 199- | (fC)(mG)(fU)(mU)(mU)(mA)(mC)(fG)(mU)(mC)(mG)(mG)(rU)(rU)(mG) | |
| V1.1_MCV | (mU)(mA)(mG)(mC)(rU)(rC)(rC)(dC)#(rU)(mU)(mU)(mC)(mU)(mC) | |
| | (mA)(mU)(mU)#(mU)#(mC)#(mG) | |
| CR48- | (mC)#(mU)#(mG)#(mA)(mA)(mC)(dT)#(mU)(mG)(mU)(mG)(fG)(mC) | 375 |
| 199- | (fC)(mG)(fU)(mU)(mU)(mA)(mC)(fG)(mU)(mC)(mG)(mG)(rU)(rU)(mG) | |
| V1.2_MCV | (mU)(mA)(mG)(mC)(rU)(rC)(dC)#(rC)(rU)(mU)(mU)(mC)(mU)(mC) | |
| | (mA)(mU)(mU)#(mU)#(mC)#(mG) | |
| CR48- | (mC)#(mU)#(mG)#(mA)(mA)(mC)(dT)#(mU)(mG)(mU)(mG)(fG)(mC) | 376 |
| 199- | (fC)(mG)(fU)(mU)(mU)(mA)(mC)(fG)(mU)(mC)(mG)(mG)(rU)(rU)(mG) | |
| V1.3_MCV | (mU)(mA)(mG)(mC)(rU)(rC)(rC)(rC)(dT)#(mU)(mU)(mC)(mU)(mC) | |
| | (mA)(mU)(mU)#(mU)#(mC)#(mG) | |
| CR48- | (mC)#(mU)#(mG)#(mA)(mA)(mC)(dT)#(mU)(mG)(mU)(mG)(fG)(mC) | 377 |
| 199- | (fC)(mG)(fU)(mU)(mU)(mA)(mC)(fG)(mU)(mC)(mG)(mG)(rU)(rU)(mG) | |
| V1.4_MCV | (mU)(mA)(mG)(mC)(rU)(rC)(mC)(rC)(rU)(mU)(mU)(mC)(mU)(mC)(mA) | |
| | (mU)(mU)#(mU)#(mC)#(mG) | |
| CR48- | (mC)#(mU)#(mG)#(mA)(mA)(mC)(dT)#(mU)(mG)(mU)(mG)(fG)(mC) | 378 |
| 199- | (fC)(mG)(fU)(mU)(mU)(mA)(mC)(fG)(mU)(mC)(mG)(mG)(rU)(rU)(mG) | |
| V1.5_MCV | (mU)(mA)(mG)(mC)(rU)(rC)(dC)#(dC)#(rU)(mU)(mU)(mC)(mU)(mC) | |
| | (mA)(mU)(mU)#(mU)#(mC)#(mG) | |
| CR48- | (mC)#(mU)#(mG)#(mA)(mA)(mC)(dT)#(mU)(mG)(mU)(mG)(fG)(mC) | 379 |
| 199- | (fC)(mG)(fU)(mU)(mU)(mA)(mC)(fG)(mU)(mC)(mG)(mG)(rU)(rU)(mG) | |
| V1.6_MCV | (mU)(mA)(mG)(mC)(rU)(rC)(dC)#(rC)(dT)#(mU)(mU)(mC)(mU)(mC) | |
| | (mA)(mU)(mU)#(mU)#(mC)#(mG) | |
| CR48- | (mC)#(mU)#(mG)#(mA)(mA)(mC)(dT)#(mU)(mG)(mU)(mG)(fG)(mC) | 380 |
| 199- | (fC)(mG)(fU)(mU)(mU)(mA)(mC)(fG)(mU)(mC)(mG)(mG)(rU)(rU)(mG) | |
| V1.7_MCV | (mU)(mA)(mG)(mC)(rU)(rC)(dC)#(dC)#(dT)#(mU)(mU)(mC)(mU)(mC) | |
| | (mA)(mU)(mU)#(mU)#(mC)#(mG) | |
| CR48- | (mC)#(mU)#(mG)#(mA)(mA)(mC)(dT)#(mU)(mG)(mU)(mG)(fG)(mC) | 381 |
| 199- | (fC)(mG)(fU)(mU)(mU)(mA)(mC)(fG)(mU)(mC)(mG)(mG)(rU)(rU)(mG) | |
| V1.8_MCV | (mU)(mA)(mG)(mC)(rU)(rC)(mC)(dC)#(rU)(mU)(mU)(mC)(mU)(mC) | |
| | (mA)(mU)(mU)#(mU)#(mC)#(mG) | |
| CR48- | (mC)#(mU)#(mG)#(mA)(mA)(mC)(dT)#(mU)(mG)(mU)(mG)(fG)(mC) | 382 |
| 199- | (fC)(mG)(fU)(mU)(mU)(mA)(mC)(fG)(mU)(mC)(mG)(mG)(rU)(rU)(mG) | |
| V1.9_MCV | (mU)(mA)(mG)(mC)(rU)(rC)(mC)(rC)(dT)#(mU)(mU)(mC)(mU)(mC) | |
| | (mA)(mU)(mU)#(mU)#(mC)#(mG) | |
| CR48- | (mC)#(mU)#(mG)#(mA)(mA)(mC)(dT)#(mU)(mG)(mU)(mG)(fG)(mC) | 383 |
| 199- | (fC)(mG)(fU)(mU)(mU)(mA)(mC)(fG)(mU)(mC)(mG)(mG)(rU)(rU)(mG) | |
| V1.10_ | (mU)(mA)(mG)(mC)(rU)(rC)(mC)(dC)#(dT)#(mU)(mU)(mC)(mU)(mC) | |
| MCV | (mA)(mU)(mU)#(mU)#(mC)#(mG) | |
| CR48- | (mC)#(mU)#(mG)#(mA)(mA)(mC)(dT)#(mU)(mG)(mU)(mG)(fG)(mC) | 384 |
| 199- | (fC)(mG)(fU)(mU)(mU)(mA)(mC)(fG)(mU)(mC)(mG)(mG)(rU)(rU)(mG) | |
| V1.11_ | (mU)(mA)(mG)(mC)(rU)(rC)(mC)(mC)(rU)(mU)(mU)(mC)(mU)(mC) | |
| MCV | (mA)(mU)(mU)#(mU)#(mC)#(mG) | |
| CR48- | (mC)#(mU)#(mG)#(mA)(mA)(mC)(dT)#(mU)(mG)(mU)(mG)(fG)(mC) | 385 |
| 199- | (fC)(mG)(fU)(mU)(mU)(mA)(mC)(fG)(mU)(mC)(mG)(mG)(rU)(rU)(mG) | |
| V1.12_ | (mU)(mA)(mG)(mC)(rU)(rC)(mC)(mC)(dT)#(mU)(mU)(mC)(mU)(mC) | |
| MCV | (mA)(mU)(mU)#(mU)#(mC)#(mG) | |
| CR48- | (mC)#(mU)#(mG)#(mA)(mA)(mC)(dT)#(mU)(mG)(mU)(mG)(fG)(mC)(f | 386 |
| 199- | C)(mG)(fU)(mU)(mU)(mA)(mC)(fG)(mU)(mC)(mG)(mG)(rU)(rU)(mG)( | |
| V1.13_ | mU)(mA)(mG)(mC)(dT)#(rC)(rC)(dC)#(rU)(mU)(mU)(mC)(mU)(mC)(m | |
| MCV | A)(mU)(mU)#(mU)#(mC)#(mG) | |
| CR48- | (mC)#(mU)#(mG)#(mA)(mA)(mC)(dT)#(mU)(mG)(mU)(mG)(fG)(mC)(f | 387 |
| 199- | C)(mG)(fU)(mU)(mU)(mA)(mC)(fG)(mU)(mC)(mG)(mG)(rU)(rU)(mG)( | |
| V1.14_ | mU)(mA)(mG)(mC)(dT)#(rC)(dC)#(rC)(rU)(mU)(mU)(mC)(mU)(mC)(m | |
| MCV | A)(mU)(mU)#(mU)#(mC)#(mG) | |
| CR48- | (mC)#(mU)#(mG)#(mA)(mA)(mC)(dT)#(mU)(mG)(mU)(mG)(fG)(mC)(f | 388 |
| 199- | C)(mG)(fU)(mU)(mU)(mA)(mC)(fG)(mU)(mC)(mG)(mG)(rU)(rU)(mG)( | |
| V1.15_ | mU)(mA)(mG)(mC)(dT)#(rC)(rC)(rC)(dT)#(mU)(mU)(mC)(mU)(mC)(m | |
| MCV | A)(mU)(mU)#(mU)#(mC)#(mG) | |
| CR48- | (mC)#(mU)#(mG)#(mA)(mA)(mC)(dT)#(mU)(mG)(mU)(mG)(fG)(mC)(f | 389 |
| 199- | C)(mG)(fU)(mU)(mU)(mA)(mC)(fG)(mU)(mC)(mG)(mG)(rU)(rU)(mG)( | |
| V1.16_ | mU)(mA)(mG)(mC)(dT)#(rC)(mC)(rC)(rU)(mU)(mU)(mC)(mU)(mC)(m | |
| MCV | A)(mU)(mU)#(mU)#(mC)#(mG) | |
| CR48- | (mC)#(mU)#(mG)#(mA)(mA)(mC)(dT)#(mU)(mG)(mU)(mG)(fG)(mC)(f | 390 |
| 199- | C)(mG)(fU)(mU)(mU)(mA)(mC)(fG)(mU)(mC)(mG)(mG)(rU)(rU)(mG)( | |
| V1.17_ | mU)(mA)(mG)(mC)(dT)#(rC)(dC)#(dC)#(rU)(mU)(mU)(mC)(mU)(mC)( | |
| MCV | mA)(mU)(mU)#(mU)#(mC)#(mG) | |
| CR48- | (mC)#(mU)#(mG)#(mA)(mA)(mC)(dT)#(mU)(mG)(mU)(mG)(fG)(mC)(f | 391 |
| 199- | C)(mG)(fU)(mU)(mU)(mA)(mC)(fG)(mU)(mC)(mG)(mG)(rU)(rU)(mG)( | |
| V1.18_ | mU)(mA)(mG)(mC)(dT)#(rC)(dC)#(rC)(dT)#(mU)(mU)(mC)(mU)(mC)( | |
| MCV | mA)(mU)(mU)#(mU)#(mC)#(mG) | |
| CR48- | (mC)#(mU)#(mG)#(mA)(mA)(mC)(dT)#(mU)(mG)(mU)(mG)(fG)(mC)(f | 392 |
| 199- | C)(mG)(fU)(mU)(mU)(mA)(mC)(fG)(mU)(mC)(mG)(mG)(rU)(rU)(mG)( | |
| V1.19_ | mU)(mA)(mG)(mC)(dT)#(rC)(dC)#(dC)#(dT)#(mU)(mU)(mC)(mU)(mC) | |
| MCV | (mA)(mU)(mU)#(mU)#(mC)#(mG) | |
| CR48- | (mC)#(mU)#(mG)#(mA)(mA)(mC)(dT)#(mU)(mG)(mU)(mG)(fG)(mC)(f | 393 |
| 199- | C)(mG)(fU)(mU)(mU)(mA)(mC)(fG)(mU)(mC)(mG)(mG)(rU)(rU)(mG)( | |
| V1.20_ | mU)(mA)(mG)(mC)(dT)#(rC)(mC)(dC)#(rU)(mU)(mU)(mC)(mU)(mC)( | |
| MCV | mA)(mU)(mU)#(mU)#(mC)#(mG) | |
| CR48- | (mC)#(mU)#(mG)#(mA)(mA)(mC)(dT)#(mU)(mG)(mU)(mG)(fG)(mC)(f | 394 |
| 199- | C)(mG)(fU)(mU)(mU)(mA)(mC)(fG)(mU)(mC)(mG)(mG)(rU)(rU)(mG)( | |
| V1.21_ | mU)(mA)(mG)(mC)(dT)#(rC)(mC)(rC)(dT)#(mU)(mU)(mC)(mU)(mC)( | |
| MCV | mA)(mU)(mU)#(mU)#(mC)#(mG) | |
| CR48- | (mC)#(mU)#(mG)#(mA)(mA)(mC)(dT)#(mU)(mG)(mU)(mG)(fG)(mC)(f | 395 |
| 199- | C)(mG)(fU)(mU)(mU)(mA)(mC)(fG)(mU)(mC)(mG)(mG)(rU)(rU)(mG)( | |
| V1.22_ | mU)(mA)(mG)(mC)(dT)#(rC)(mC)(dC)#(dT)#(mU)(mU)(mC)(mU)(mC)( | |
| MCV | mA)(mU)(mU)#(mU)#(mC)#(mG) | |
| CR48- | (mC)#(mU)#(mG)#(mA)(mA)(mC)(dT)#(mU)(mG)(mU)(mG)(fG)(mC)(f | 396 |
| 199- | C)(mG)(fU)(mU)(mU)(mA)(mC)(fG)(mU)(mC)(mG)(mG)(rU)(rU)(mG)( | |
| V1.23_ | mU)(mA)(mG)(mC)(dT)#(rC)(mC)(mC)(rU)(mU)(mU)(mC)(mU)(mC)(m | |
| MCV | A)(mU)(mU)#(mU)#(mC)#(mG) | |
| CR48- | (mC)#(mU)#(mG)#(mA)(mA)(mC)(dT)#(mU)(mG)(mU)(mG)(fG)(mC)(f | 397 |
| 199- | C)(mG)(fU)(mU)(mU)(mA)(mC)(fG)(mU)(mC)(mG)(mG)(rU)(rU)(mG)( | |
| V1.24_ | mU)(mA)(mG)(mC)(dT)#(rC)(mC)(mC)(dT)#(mU)(mU)(mC)(mU)(mC)( | |
| MCV | mA)(mU)(mU)#(mU)#(mC)#(mG) | |
| CR48- | (mC)#(mU)#(mG)#(mA)(mA)(mC)(dT)#(mU)(mG)(mU)(mG)(fG)(mC)(f | 398 |
| 199- | C)(mG)(fU)(mU)(mU)(mA)(mC)(fG)(mU)(mC)(mG)(mG)(dT)#(rU)(mG) | |
| V1.25_ | (mU)(mA)(mG)(mC)(dT)#(rC)(rC)(dC)#(rU)(mU)(mU)(mC)(mU)(mC)( | |
| MCV | mA)(mU)(mU)#(mU)#(mC)#(mG) | |
| CR48- | (mC)#(mU)#(mG)#(mA)(mA)(mC)(dT)#(mU)(mG)(mU)(mG)(fG)(mC)(f | 399 |
| 199- | C)(mG)(fU)(mU)(mU)(mA)(mC)(fG)(mU)(mC)(mG)(mG)(dT)#(rU)(mG) | |
| V1.26_ | (mU)(mA)(mG)(mC)(dT)#(rC)(dC)#(rC)(rU)(mU)(mU)(mC)(mU)(mC)( | |
| MCV | mA)(mU)(mU)#(mU)#(mC)#(mG) | |
| CR48- | (mC)#(mU)#(mG)#(mA)(mA)(mC)(dT)#(mU)(mG)(mU)(mG)(fG)(mC)(f | 400 |
| 199- | C)(mG)(fU)(mU)(mU)(mA)(mC)(fG)(mU)(mC)(mG)(mG)(dT)#(rU)(mG) | |
| V1.27_ | (mU)(mA)(mG)(mC)(dT)#(rC)(rC)(rC)(dT)#(mU)(mU)(mC)(mU)(mC)(m | |
| MCV | A)(mU)(mU)#(mU)#(mC)#(mG) | |
| CR48- | (mC)#(mU)#(mG)#(mA)(mA)(mC)(dT)#(mU)(mG)(mU)(mG)(fG)(mC)(f | 401 |
| 199- | C)(mG)(fU)(mU)(mU)(mA)(mC)(fG)(mU)(mC)(mG)(mG)(dT)#(rU)(mG) | |
| V1.28_ | (mU)(mA)(mG)(mC)(dT)#(rC)(mC)(rC)(rU)(mU)(mU)(mC)(mU)(mC)(m | |
| MCV | A)(mU)(mU)#(mU)#(mC)#(mG) | |
| CR48- | (mC)#(mU)#(mG)#(mA)(mA)(mC)(dT)#(mU)(mG)(mU)(mG)(fG)(mC)(f | 402 |
| 199- | C)(mG)(fU)(mU)(mU)(mA)(mC)(fG)(mU)(mC)(mG)(mG)(dT)#(rU)(mG) | |
| V1.29_ | (mU)(mA)(mG)(mC)(dT)#(rC)(dC)#(dC)#(rU)(mU)(mU)(mC)(mU)(mC)( | |
| MCV | mA)(mU)(mU)#(mU)#(mC)#(mG) | |
| CR48- | (mC)#(mU)#(mG)#(mA)(mA)(mC)(dT)#(mU)(mG)(mU)(mG)(fG)(mC)(f | 403 |
| 199- | C)(mG)(fU)(mU)(mU)(mA)(mC)(fG)(mU)(mC)(mG)(mG)(dT)#(rU)(mG) | |
| V1.30_ | (mU)(mA)(mG)(mC)(dT)#(rC)(dC)#(rC)(dT)#(mU)(mU)(mC)(mU)(mC)( | |
| MCV | mA)(mU)(mU)#(mU)#(mC)#(mG) | |
| CR48- | (mC)#(mU)#(mG)#(mA)(mA)(mC)(dT)#(mU)(mG)(mU)(mG)(fG)(mC)(f | 404 |
| 199- | C)(mG)(fU)(mU)(mU)(mA)(mC)(fG)(mU)(mC)(mG)(mG)(dT)#(rU)(mG) | |
| V1.31_ | (mU)(mA)(mG)(mC)(dT)#(rC)(dC)#(dC)#(dT)#(mU)(mU)(mC)(mU)(mC | |
| MCV | )(mA)(mU)(mU)#(mU)#(mC)#(mG) | |
| CR48- | (mC)#(mU)#(mG)#(mA)(mA)(mC)(dT)#(mU)(mG)(mU)(mG)(fG)(mC)(f | 405 |
| 199- | C)(mG)(fU)(mU)(mU)(mA)(mC)(fG)(mU)(mC)(mG)(mG)(dT)#(rU)(mG) | |
| V1.32_ | (mU)(mA)(mG)(mC)(dT)#(rC)(mC)(dC)#(rU)(mU)(mU)(mC)(mU)(mC)( | |
| MCV | mA)(mU)(mU)#(mU)#(mC)#(mG) | |
| CR48- | (mC)#(mU)#(mG)#(mA)(mA)(mC)(dT)#(mU)(mG)(mU)(mG)(fG)(mC)(f | 406 |
| 199- | C)(mG)(fU)(mU)(mU)(mA)(mC)(fG)(mU)(mC)(mG)(mG)(dT)#(rU)(mG) | |
| V1.33_ | (mU)(mA)(mG)(mC)(dT)#(rC)(mC)(rC)(dT)#(mU)(mU)(mC)(mU)(mC)( | |
| MCV | mA)(mU)(mU)#(mU)#(mC)#(mG) | |
| CR48- | (mC)#(mU)#(mG)#(mA)(mA)(mC)(dT)#(mU)(mG)(mU)(mG)(fG)(mC)(f | 407 |
| 199- | C)(mG)(fU)(mU)(mU)(mA)(mC)(fG)(mU)(mC)(mG)(mG)(dT)#(rU)(mG) | |
| V1.34_ | (mU)(mA)(mG)(mC)(dT)#(rC)(mC)(dC)#(dT)#(mU)(mU)(mC)(mU)(mC) | |
| MCV | (mA)(mU)(mU)#(mU)#(mC)#(mG) | |
| CR48- | (mC)#(mU)#(mG)#(mA)(mA)(mC)(dT)#(mU)(mG)(mU)(mG)(fG)(mC)(f | 408 |
| 199- | C)(mG)(fU)(mU)(mU)(mA)(mC)(fG)(mU)(mC)(mG)(mG)(dT)#(rU)(mG) | |
| V1.35_ | (mU)(mA)(mG)(mC)(dT)#(rC)(mC)(mC)(rU)(mU)(mU)(mC)(mU)(mC)( | |
| MCV | mA)(mU)(mU)#(mU)#(mC)#(mG) | |
| CR48- | (mC)#(mU)#(mG)#(mA)(mA)(mC)(dT)#(mU)(mG)(mU)(mG)(fG)(mC)(f | 409 |
| 199- | C)(mG)(fU)(mU)(mU)(mA)(mC)(fG)(mU)(mC)(mG)(mG)(dT)#(rU)(mG) | |
| V1.36_ | (mU)(mA)(mG)(mC)(dT)#(rC)(mC)(mC)(dT)#(mU)(mU)(mC)(mU)(mC) | |
| MCV | (mA)(mU)(mU)#(mU)#(mC)#(mG) | |
| CR48- | (mC)#(mU)#(mG)#(mA)(mA)(mC)(dT)#(mU)(mG)(mU)(mG)(fG)(mC)(f | 410 |
| 203- | C)(mG)(fU)(mU)(mU)(fA)(mC)(fG)(mU)(mC)(mG)(mG)(rU)(rU)(mG)( | |
| V1.7_ | mU)(mA)(mG)(mC)(rU)(rC)(dC)#(dC)#(dT)#(mU)(mU)(mC)(mU)(mC)( | |
| MCV | mA)(mU)(mU)#(mU)#(mC)#(mG) | |
| CR48- | (mC)#(mU)#(mG)#(mA)(mA)(mC)(dT)#(mU)(mG)(mU)(mG)(fG)(mC)(f | 411 |
| 203- | C)(mG)(fU)(mU)(mU)(fA)(mC)(fG)(mU)(mC)(mG)(mG)(rU)(rU)(mG)( | |
| V1.10_ | mU)(mA)(mG)(mC)(rU)(rC)(mC)(dC)#(dT)#(mU)(mU)(mC)(mU)(mC)( | |
| MCV | mA)(mU)(mU)#(mU)#(mC)#(mG) | |
| CR48- | (mC)#(mU)#(mG)#(mA)(mA)(mC)(dT)#(mU)(mG)(mU)(mG)(fG)(mC)(f | 412 |
| 203- | C)(mG)(fU)(mU)(mU)(fA)(mC)(fG)(mU)(mC)(mG)(mG)(rU)(rU)(mG)( | |
| V1.12_ | mU)(mA)(mG)(mC)(rU)(rC)(mC)(mC)(dT)#(mU)(mU)(mC)(mU)(mC)(m | |
| MCV | A)(mU)(mU)#(mU)#(mC)#(mG) | |
| CR48- | (mC)#(mU)#(mG)#(mA)(mA)(mC)(dT)#(mU)(mG)(mU)(mG)(fG)(mC)(f | 413 |
| 203- | C)(mG)(fU)(mU)(mU)(fA)(mC)(fG)(mU)(mC)(mG)(mG)(rU)(rU)(mG)( | |
| V1.18_ | mU)(mA)(mG)(mC)(dT)#(rC)(dC)#(rC)(dT)#(mU)(mU)(mC)(mU)(mC)( | |
| MCV | mA)(mU)(mU)#(mU)#(mC)#(mG) | |
| CR48- | (mC)#(mU)#(mG)#(mA)(mA)(mC)(dT)#(mU)(mG)(mU)(mG)(fG)(mC)(f | 414 |
| 203- | C)(mG)(fU)(mU)(mU)(fA)(mC)(fG)(mU)(mC)(mG)(mG)(rU)(rU)(mG)( | |
| V1.19_ | mU)(mA)(mG)(mC)(dT)#(rC)(dC)#(dC)#(dT)#(mU)(mU)(mC)(mU)(mC) | |
| MCV | (mA)(mU)(mU)#(mU)#(mC)#(mG) | |
| CR48- | (mC)#(mU)#(mG)#(mA)(mA)(mC)(dT)#(mU)(mG)(mU)(mG)(fG)(mC)(f | 415 |
| 203- | C)(mG)(fU)(mU)(mU)(fA)(mC)(fG)(mU)(mC)(mG)(mG)(rU)(rU)(mG)( | |
| V1.22_ | mU)(mA)(mG)(mC)(dT)#(rC)(mC)(dC)#(dT)#(mU)(mU)(mC)(mU)(mC)( | |
| MCV | mA)(mU)(mU)#(mU)#(mC)#(mG) | |
| CR48- | (mC)#(mU)#(mG)#(mA)(mA)(mC)(dT)#(mU)(mG)(mU)(mG)(fG)(mC)(f | 416 |
| 203- | C)(mG)(fU)(mU)(mU)(fA)(mC)(fG)(mU)(mC)(mG)(mG)(rU)(rU)(mG)( | |
| V1.24_ | mU)(mA)(mG)(mC)(dT)#(rC)(mC)(mC)(dT)#(mU)(mU)(mC)(mU)(mC)( | |
| MCV | mA)(mU)(mU)#(mU)#(mC)#(mG) | |
| CR48- | (mC)#(mU)#(mG)#(mA)(mA)(mC)(dT)#(mU)(mG)(mU)(mG)(fG)(mC)(f | 417 |
| 203- | C)(mG)(fU)(mU)(mU)(fA)(mC)(fG)(mU)(mC)(mG)(mG)(dT)#(rU)(mG)( | |
| V1.30_ | mU)(mA)(mG)(mC)(dT)#(rC)(dC)#(rC)(dT)#(mU)(mU)(mC)(mU)(mC)( | |
| MCV | mA)(mU)(mU)#(mU)#(mC)#(mG) | |
| CR48- | (mC)#(mU)#(mG)#(mA)(mA)(mC)(dT)#(mU)(mG)(mU)(mG)(fG)(mC)(f | 418 |
| 203- | C)(mG)(fU)(mU)(mU)(fA)(mC)(fG)(mU)(mC)(mG)(mG)(dT)#(rU)(mG)( | |
| V1.31_ | mU)(mA)(mG)(mC)(dT)#(rC)(dC)#(dC)#(dT)#(mU)(mU)(mC)(mU)(mC) | |
| MCV | (mA)(mU)(mU)#(mU)#(mC)#(mG) | |
| CR48- | (mC)#(mU)#(mG)#(mA)(mA)(mC)(dT)#(mU)(mG)(mU)(mG)(fG)(mC)(f | 419 |
| 203- | C)(mG)(fU)(mU)(mU)(fA)(mC)(fG)(mU)(mC)(mG)(mG)(dT)#(rU)(mG)( | |
| V1.34_ | mU)(mA)(mG)(mC)(dT)#(rC)(mC)(dC)#(dT)#(mU)(mU)(mC)(mU)(mC)( | |
| MCV | mA)(mU)(mU)#(mU)#(mC)#(mG) | |
| CR48- | (mC)#(mU)#(mG)#(mA)(mA)(mC)(dT)#(mU)(mG)(mU)(mG)(fG)(mC)(f | 420 |
| 203- | C)(mG)(fU)(mU)(mU)(fA)(mC)(fG)(mU)(mC)(mG)(mG)(dT)#(rU)(mG)( | |
| V1.36_ | mU)(mA)(mG)(mC)(dT)#(rC)(mC)(mC)(dT)#(mU)(mU)(mC)(mU)(mC)( | |
| MCV | mA)(mU)(mU)#(mU)#(mC)#(mG) | |
| CR48- | (mC)#(mU)#(mG)#(mA)(mA)(mC)(dT)#(mU)(mG)(mU)(mG)(fG)(mC)(f | 421 |
| 203- | C)(mG)(fU)(mU)(mU)(fA)(mC)(fG)(mU)(mC)(mG)(mG)(dT)#(rU)(mG)( | |
| V1.31X_ | mU)(mA)(mG)(mC)(dT)#(dC)#(dC)#(dC)#(dT)#(mU)(mU)(mC)(mU)(m | |
| MCV | C)(mA)(mU)(mU)#(mU)#(mC)#(mG) | |
| CR48- | (mA)#(mG)#(mG)#(rC)(rA)(rA)(rA)(rG)(rG)(rA)(rG)(rG)(rA)(rA)(rG)(rA | 422 |
| 0_mTTR- | )(rG)(rU)(rC)(rG)(rA)(rA)(rG)(rG)(rG)(rU)(rU)(rG)(rU)(rA)(rG)(rC)(rU)( | |
| G1 | rC)(rC)(rC)(rU)(rU)(rU)(rC)(rU)(rC)(rA)(rU)(rU)#(mU)#(mC)#(mG) | |
| CR48- | (mA)#(mG)#(mG)#(mC)(mA)(rA)(rA)(rG)(mG)(mA)(mG)(rG)(mA)(rA)( | 423 |
| 4_mTTR- | rG)(rA)(rG)(mU)(rC)(rG)(rA)(mA)(rG)(rG)(mG)(rU)(rU)(rG)(mU)(mA)( | |
| G1 | mG)(mC)(rU)(rC)(rC)(rC)(rU)(mU)(mU)(mC)(mU)(mC)(mA)(mU)(mU) | |
| | #(mU)#(mC)#(mG) | |
| CR48- | (mA)#(mG)#(mG)#(mC)(mA)(mA)(dA)#(mG)(mG)(mA)(mG)(fG)(mA)(f | 424 |
| 199_ | A)(mG)(fA)(mG)(mU)(mC)(mG)(fA)(mA)(mG)(mG)(mG)(rU)(rU)(rG)( | |
| mTTR-G1 | mU)(mA)(mG)(mC)(rU)(rC)(rC)(rC)(rU)(mU)(mU)(mC)(mU)(mC)(mA)( | |
| | mU)(mU)#(mU)#(mC)#(mG) | |
| CR48- | (mA)#(mG)#(mG)#(mC)(mA)(mA)(dA)#(mG)(mG)(mA)(mG)(fG)(mA)(f | 425 |
| 203_ | A)(mG)(fA)(mG)(mU)(fC)(mG)(fA)(mA)(mG)(mG)(mG)(rU)(rU)(rG)(m | |
| mTTR-G1 | U)(mA)(mG)(mC)(rU)(rC)(rC)(rC)(rU)(mU)(mU)(mC)(mU)(mC)(mA)(m | |
| | U)(mU)#(mU)#(mC)#(mG) | |
| CR48- | (mA)#(mG)#(mG)#(mC)(mA)(mA)(dA)#(mG)(mG)(mA)(mG)(fG)(mA)(f | 426 |
| 199- | A)(mG)(fA)(mG)(mU)(mC)(mG)(fA)(mA)(mG)(mG)(mG)(rU)(rU)(mG)( | |
| V1.7_ | mU)(mA)(mG)(mC)(rU)(rC)(dC)#(dC)#(dT)#(mU)(mU)(mC)(mU)(mC)( | |
| mTTR- | mA)(mU)(mU)#(mU)#(mC)#(mG) | |
| G1 | | |
| CR199- | (mA)#(mG)#(mG)#(mC)(mA)(mA)(dA)#(mG)(mG)(mA)(mG)(fG)(mA)(f | 427 |
| V1.18_ | A)(mG)(fA)(mG)(mU)(mC)(mG)(fA)(mA)(mG)(mG)(mG)(rU)(rU)(mG)( | |
| mTTR- | mU)(mA)(mG)(mC)(dT)#(rC)(dC)#(rC)(dT)#(mU)(mU)(mC)(mU)(mC)( | |
| G1 | mA)(mU)(mU)#(mU)#(mC)#(mG) | |
| CR199- | (mA)#(mG)#(mG)#(mC)(mA)(mA)(dA)#(mG)(mG)(mA)(mG)(fG)(mA)(f | 428 |
| V1.31_ | A)(mG)(fA)(mG)(mU)(mC)(mG)(fA)(mA)(mG)(mG)(mG)(dT)#(rU)(mG | |
| mTTR- | )(mU)(mA)(mG)(mC)(dT)#(rC)(dC)#(dC)#(dT)#(mU)(mU)(mC)(mU)(m | |
| GI | C)(mA)(mU)(mU)#(mU)#(mC)#(mG) | |
| CR48- | (mG)#(mG)#(mG)#(rG)(rC)(rC)(rA)(rG)(rC)(rU)(rU)(rC)(rA)(rG)(rA)(rC | 429 |
| 0_ | )(rA)(rC)(rA)(rA)(rA)(rU)(rA)(rC)(rG)(rU)(rU)(rG)(rU)(rA)(rG)(rC)(rU) | |
| mTTR-G2 | (rC)(rC)(rC)(rU)(rU)(rU)(rC)(rU)(rC)(rA)(rU)(rU)#(mU)#(mC)#(mG) | |
| CR48- | (mG)#(mG)#(mG)#(mG)(mC)(rC)(rA)(rG)(mC)(mU)(mU)(rC)(mA)(rG)( | 430 |
| 4_ | mA)(rC)(rA)(mC)(rA)(rA)(rA)(mU)(rA)(rC)(mG)(rU)(rU)(rG)(mU)(mA)( | |
| mTTR-G2 | mG)(mC)(rU)(rC)(rC)(rC)(rU)(mU)(mU)(mC)(mU)(mC)(mA)(mU)(mU) | |
| | #(mU)#(mC)#(mG) | |
| CR48- | (mG)#(mG)#(mG)#(mG)(mC)(mC)(dA)#(mG)(mC)(mU)(mU)(fC)(mA)(f | 431 |
| 199_ | G)(mA)(mC)(mA)(mC)(mA)(mA)(fA)(mU)(mA)(mC)(mG)(rU)(rU)(rG)( | |
| mTTR-G2 | mU)(mA)(mG)(mC)(rU)(rC)(rC)(rC)(rU)(mU)(mU)(mC)(mU)(mC)(mA)( | |
| | mU)(mU)#(mU)#(mC)#(mG) | |
| CR48- | (mG)#(mG)#(mG)#(mG)(mC)(mC)(dA)#(mG)(mC)(mU)(mU)(fC)(mA)(f | 432 |
| 203_ | G)(mA)(mC)(mA)(mC)(fA)(mA)(fA)(mU)(mA)(mC)(mG)(rU)(rU)(rG)( | |
| mTTR-G2 | mU)(mA)(mG)(mC)(rU)(rC)(rC)(rC)(rU)(mU)(mU)(mC)(mU)(mC)(mA)( | |
| | mU)(mU)#(mU)#(mC)#(mG) | |
| CR48- | (mG)#(mG)#(mG)#(mG)(mC)(mC)(dA)#(mG)(mC)(mU)(mU)(fC)(mA)(f | 433 |
| 199- | G)(mA)(mC)(mA)(mC)(mA)(mA)(fA)(mU)(mA)(mC)(mG)(rU)(rU)(mG) | |
| V1.7_ | (mU)(mA)(mG)(mC)(rU)(rC)(dC)#(dC)#(dT)#(mU)(mU)(mC)(mU)(mC)( | |
| mTTR- | mA)(mU)(mU)#(mU)#(mC)#(mG) | |
| G2 | | |
| CR199- | (mG)#(mG)#(mG)#(mG)(mC)(mC)(dA)#(mG)(mC)(mU)(mU)(fC)(mA)(f | 434 |
| V1.18_ | G)(mA)(mC)(mA)(mC)(mA)(mA)(fA)(mU)(mA)(mC)(mG)(rU)(rU)(mG) | |
| mTTR- | (mU)(mA)(mG)(mC)(dT)#(rC)(dC)#(rC)(dT)#(mU)(mU)(mC)(mU)(mC)( | |
| G2 | mA)(mU)(mU)#(mU)#(mC)#(mG) | |
| CR199- | (mG)#(mG)#(mG)#(mG)(mC)(mC)(dA)#(mG)(mC)(mU)(mU)(fC)(mA)(f | 435 |
| V1.31_ | G)(mA)(mC)(mA)(mC)(mA)(mA)(fA)(mU)(mA)(mC)(mG)(dT)#(rU)(m | |
| mTTR- | G)(mU)(mA)(mG)(mC)(dT)#(rC)(dC)#(dC)#(dT)#(mU)(mU)(mC)(mU)( | |
| G2 | mC)(mA)(mU)(mU)#(mU)#(mC)#(mG) | |

KEY: rN = RNA, mN = 2’-O-methyl RNA, fN = 2’-fluoro RNA, dN = 2’-deoxy RNA, N = A, U, G, or C
N#N = phosphorothioate linkage

TABLE 5
Exemplary sgRNAs.
KEY: rN = RNA, mN = 2′-O-methyl RNA, fN = 2′-fluoro RNA, dN = 2′-deoxy RNA,
N = A, U, G, or C
N#N = phosphorothioate linkage

| | | SEQ |
|---|---|---|
| | | ID |
| Name | Sequence | NO: |
| SG-1 | (mC)#(mU)#(mG)#(rA)(rA)(rC)(rU)(rU)(rG)(rU)(rG)(rG)(rC)(rC)(rG)(rU)(rU) | 436 |
| TLR | (rU)(rA)(rC)(rG)(rU)(rC)(rG)(rG)(rU)(rU)(rG)(rU)(rA) | |
| MCV | (rG)(rC)(rU)(rC)(rC)(rC)(mG)(mA)(mA)(mA)(rC)(rG)(rU)(rU)(rG)(rC)(rU)(rA) | |
| | (rC)(rA)(rA)(rU)(rA)(rA)(rG)(rG)(rC)(rC)(rG) | |
| | (rU)(mC)(mU)(mG)(mA)(mA)(mA)(mA)(mG)(rA)(rU)(rG)(rU)(rG)(rC)(rC)(rG)(rC) | |
| | (rA)(rA)(rC)(rG)(rC)(rU)(rC)(rU)(rG)(rC)(rC) | |
| | (mU)(mU)(mC)(mU)(rG)(rG)(rC)(rA)(rU)(rC)(rG)(rU)#(mU)#(mU)#(mA) | |
| SG-2 | (mC)#(mU)#(mG)#(rA)(rA)(rC)(rU)(rU)(rG)(rU)(rG)(rG)(rC)(rC)(rG)(rU)(rU) | 437 |
| TLR | (rU)(rA)(rC)(rG)(rU)(rC)(rG)(rG)(rU)(rU)(rG)(rU)(mA)(mG)(mC)(rU)(rC)(rC) | |
| MCV | (rC)(mG)(mA)(mA)(mA)(rC)(rG)(rU)(rU)(rG)(rC)(rU)(rA)(rC)(rA)(rA)(rU)(rA) | |
| | ((rA)rG)(rG)(mC)(mC)(rG)(mU)(mC)(mU)(mG)(mA)(mA)(mA)(mA)(mG)(rA)(rU)(rG) | |
| | (rU)(rG)(rC)(rC)(rG)(rC)(rA)(rA)(rC)(rG)(rC)(mU)(mC)(mU)(mG)(rC)(rC)(mU) | |
| | (mU)(mC)(mU)(rG)(rG)(rC)(rA)(rU)(mC)(mG)(mU)#(mU)#(mU)#(mA) | |
| SG-3 | (mC)#(mU)#(mG)#(mA)(mA)(rC)(rU)(rU)(mG)(mU)(mG)(rG)(mC)(rC)(rG)(rU)(rU) | 438 |
| TLR | (mU)(rA)(rC)(rG)(mU)(rC)(rG)(mG)(rU)(rU)(rG)(mU)(mA)(mG)(mC)(rU)(rC) | |
| MCV | (rC)(rC)(mG)(mA)(mA)(mA)(mC)(rG)(mU)(rU)(mG)(mC)(rU)(mA)(mC)(rA)(rA) | |
| | (rU)(rA)(mA)(rG)(mG)(mC)(mC)(mG)(mU)(mC)(mU)(mG)(mA)(mA)(mA)(mA) | |
| | m(G)(mA)(mU)(rG)(mU)(mG)(mC)(mC)(mG)(mC)(mA)(mA)(mC)(mG)(mC)(mU) | |
| | (mC)(mU)(mG)(mC)(mC)(mU)(mU)(mC)(mU)(rG)(mG)(rC)(mA)(mU)(mC)(mG) | |
| | (mU)#(mU)#(mU)#(mA) | |
| SG-4 | (mC)#(mU)#(mG)#(mA)(mA)(rC)(rU)(rU)(mG)(mU)(mG)(rG)(mC)(rC)(rG)(mU) | 439 |
| TLR | (rU)(mU)(rA)(rC)(rG)(mU)(rC)(rG)(mG)(rU)(rU)(rG)(mU)(mA)(mG)(mC)(rU)(rC) | |
| MCV | (rC)(rC)(mG)(mA)(mA)(mA)(mC)(rG)(mU)(rU)(mG)(mC)(rU)(mA)(mC)(rA)(rA) | |
| | (rU)(rA)(mA)(rG)(mG)(fC)(mC)(fG)(mU)(fC)(mU)(fG)(mA)(fA)(mA)(fA)(mG) | |
| | (fA)(mU)(rG)(mU)(fG)(mC)(fC)(mG)(fC)(mA)(fA)(mC)(fG)(mC) | |
| | (fU)(mC)(fU)(mG)(fC)(mC)(fU)(mU)(fC)(mU)(rG)(mG)(rC)(mA)(fU)(mC)(fG) | |
| | (mU)#(mU)#(mU)#(mA) | |
| SG-5 | (mC)#(mU)#(mG)#(mA)(mA)(rC)(rU)(rU)(mG)(mU)(mG)(rG)(mC)(rC)(rG)(rU)(rU) | 440 |
| TLR | (mU)(rA)(rC)(rG)(mU)(rC)(rG)(mG)(rU)(rU)(rG)(mU)(mA)(mG)(mC)(rU)(rC) | |
| MCV | (rC)(rC)(mG)(mA)(mA)(mA)(rC)(rG)(rU)(rU)(rG(rC)(rU)(rA)(rC)(rA)(rA)(rU) | |
| | (rA)(rA)(rG)(rG)(mC)(mC)(rG)(mU)(mC(mU)(mG)(mA)(mA)(mA)(mA)(mG)(rA)(rU) | |
| | (rG)(rU)(rG)(rC)(rC)(rG)(rC)(rA(rA)(rC)(rG)(rC)(mU)(mC)(mU)(mG)(rC)(rC) | |
| | (mU)(mU)(mC)(mU)(rG)(rG)(rC)(rA)(rU)(mC)(mG)(mU)#(mU)#(mU)#(mA) | |
| SG-6 | (mC)#(mU)#(mG)#(rA)(mA)(rC)(rU)(rU)(mG)(mU)(rG)(rG)(mC)(rC)(rG)(rU)(rU) | 441 |
| TLR | (mU)(rA)(rC)(rG)(mU)(rC)(rG)(mG)(rU)(rU)(rG)(rU)(mA)(mG)(mC)(rU)(rC) | |
| MCV | (rC)(rC)(mG)(mA)(mA)(mA)(rC)(rG)(rU)(rU)(rG)(rC)(rU)(rA)(rC)(rA)(rA)(rU) | |
| | (rA)(rA)(rG)(rG)(mC)(mC)(rG)(mU)(mC)(mU)(mG)(mA)(mA)(mA)(mA)(mG)(rA)(rU) | |
| | (rG)(rU)(rG)(rC)(rC)(rG)(rC)(rA)(rA)(rC)(rG)(rC)(mU)(mC)(mU)(mG)(rC)(rC) | |
| | (mU)(mU)(mC)(mU)(rG)(rG)(rC)(rA)(rU)(mC)(mG)(mU)#(mU)#(mU)#(mA) | |
| SG-7 | (mC)#(mU)#(mG)#(rA)(rA)(rC)(rU)(rU)(rG)(rU)(rG)(rG)(rC)(rC)(rG)(rU)(rU) | 442 |
| TLR | (mU)(rA)(rC)(rG)(mU)(rC)(rG)(rG)(rU)(rU)(rG)(rU)(mA)(mG)(mC)(rU)(rC)(rC) | |
| MCV | (rC)(mG)(mA)(mA)(mA)(rC)(rG)(rU)(rU)(rG)(rC)(rU)(rA)(rC)(rA)(rA)(rU)(rA) | |
| | (rA)(rG)(rG)(mC)(mC)(rG)(mU)(mC)(mU)(mG)(mA)(mA)(mA)(mA)(mG)(rA)(rU)(rG) | |
| | (rU)(rG)(rC)(rC)(rG)(rC)(rA)(rA)(rC)(rG)(rC)(mU)(mC)(mU)(mG)(rC)(rC)(mU) | |
| | (mU)(mC)(mU)(rG)(rG)(rC)(rA)(rU)(mC)(mG)(mU)#(mU)#(mU)#(mA) | |
| SG-8 | (mC)#(mU)#(mG)#(mA)(mA)(mC)(mU)(mU)(mG)(mU)(mG)(mG)(mC)(mC)(rG) | 443 |
| TLR | (rU)(rU)(rU)(rA)(rC)(rG)(rU)(rC)(rG)(rG)(rU)(rU)(rG)(rU)(mA)(mG)(mC)(rU) | |
| MCV | (rC)(rC)(rC)(mG)(mA)(mA)(mA)(rC)(rG)(rU)(rU)(rG)(rC)(rU)(rA)(rC)(rA(rA) | |
| | (rU)(rA)(rA)(rG)(rG)(mC)(mC)(rG)(mU)(mC)(mU)(mG)(mA)(mA)(mA)(mA)(mG)(rA) | |
| | (rU)(rG)(rU)(rG)(rC)(rC)(rG)(rC)(rA)(rA)(rC)(rG)(rC)(mU)(mC)(mU)(mG)(rC) | |
| | (rC)(mU)(mU)(mC)(mU)(rG)(rG)(rC)(rA)(rU)(mC)(mG)(mU)#(mU)#(mU)#(mA) | |
| SG-9 | (mC)#(mU)#(mG)#(mA)(mA)(mC)(mU)(mU)(mG)(mU)(mG)(mG)(mC)(mC)(rG) | 444 |
| TLR | (rU)(rU)(mU)(rA)(rC)(rG)(mU)(rC)(rG)(mG)(rU)(rU)(rG)(mU)(mA)(mG)(mC)(rU) | |
| MCV | (rC)(rC)(rC)(mG)(mA)(mA)(mA)(rC)(rG)(rU)(rU)(rG)(rC)(rU)(rA)(rC)(rA)(rA) | |
| | (rU)(rA)(rA)(rG)(rG)(mC)(mC)(rG)(mU)(mC)(mU)(mG)(mA)(mA)(mA)(mA)(mG) | |
| | (rA)(rU)(rG)(rU)(rG)(rC)(rC)(rG)(rC)(rA)(rA)(rC)(rG)(rC)(mU)(mC)(mU)(mG) | |
| | (rC)(rC)(mU)(mU)(mC)(mU)(rG)(rG)(rC)(rA)(rU)(mC)(mG)(mU)#(mU)#(mU)#(mA) | |
| SG-10 | (mC)#(mU)#(mG)#(mA)(mA)(rC)(rU)(rU)(mG)(mU)(mG)(rG)(mC)(rC)(rG)(rU)(rU) | 445 |
| TLR | (mU)(rA)(rC)(rG)(mU)(rC)(rG)(mG)(rU)(rU)(rG)(mU)(mA)(mG)(mC)(rU)(rC)(rC) | |
| MCV | (rC)(mG)(mA)(mA)(mA)(rC)(rG)(rU)(rU)(rG)(rC)(rU)(rA)(rC)(rA)(rA)(rU)(rA) | |
| | (mA)(rG)(mG)(mC)(mC)(mG)(mU)(mC)(mU)(mG)(mA)(mA)(mA)(mA)(mG)(mA)(mU)(rG) | |
| | (rU)(mG)(mC)(mC)(rG)(rC)(rA)(rA)(rC)(rG)(rC)(mU)(mC)(mU)(mG)(rC)(rC)(mU) | |
| | (mU)(mC)(mU)(rG)(rG)(rC)(rA)(rU)(mC)(mG)(mU)#(mU)#(mU)#(mA) | |
| SG-11 | (mC)#(mU)#(mG)#(mA)(mA)(rC)(rU)(rU)(mG)(mU)(mG)(rG)(mC)(rC)(rG)(rU)(rU) | 446 |
| TLR | (mU)(rA)(rC)(rG)(mU)(rC)(rG)(mG)(rU)(rU)(rG)(mU)(mA)(mG)(mC)(rU)(rC)(rC) | |
| MCV | (rC)(mG)(mA)(mA)(mA)(rC)(rG)(rU)(rU)(rG)(rC)(rU)(rA)(rC)(rA)(rA)(rU)(rA) | |
| | (rA)(rG)(rG)(mC)(mC)(rG)(mU)(mC)(mU)(mG)(mA)(mA)(mA)(mA)(mG)(rA)(rU)(rG) | |
| | (rU)(rG)(rC)(rC)(mG)(rC)(mA)(mA)(mC)(mG)(mC)(mU)(mC)(mU)(mG)(mC)(mC)(mU) | |
| | (mU)(mC)(mU)(rG)(mG)(rC)(mA)(rU)(mC)(mG)(mU)#(mU)#(mU)#(mA) | |
| SG-12 | (mC)#(mU)#(mG)#(mA)(mA)(rC)(rU)(rU)(mG)(mU)(mG)(rG)(mC)(rC)(rG)(rU)(rU) | 447 |
| TLR | (mU)(rA)(rC)(rG)(mU)(rC)(rG)(fG)(rU)(rU)(rG)(fU)(fA)(fG)(fC)(rU)(rC)(rC) | |
| MCV | (rC)(mG)(mA)(mA)(mA)(rC)(rG)(rU)(rU)(rG)(rC)(rU)(rA)(rC)(rA)(rA)(rU)(rA) | |
| | (rA)(rG)(rG)(fC)(fC)(rG)(fU)(fC)(fU)(mG)(mA)(mA)(mA)(fA)(fG)(rA)(rU)(rG) | |
| | (rU)(rG)(rC)(rC)(rG)(rC)(rA)(rA)(rC)(rG)(rC)(mU)(mC)(fU)(fG)(rC)(rC)(mU) | |
| | (mU)(mC)(mU)(rG)(rG)(rC)(rA)(rU)(fC)(fG)(fU)#(fU)#(mU)#(mA) | |
| SG-13 | (mC)#(mU)#(mG)#(mA)(mA)(rC)(rU)(rU)(mG)(mU)(mG)(rG)(mC)(rC)(rG)(rU)(rU) | 448 |
| TLR | (mU)(rA)(rC)(rG)(mU)(rC)(rG)(fG)(rU)(rU)(rG)(fU)(fA)(fG)(fC)(rU)(rC)(rC) | |
| MCV | (rC)(mG)(mA)(mA)(mA)(mC)(rG)(mU)(rU)(fG)(fC)(rU)(fA)(fC)(rA)(rA)(rU)(rA) | |
| | (rA)(rG)(rG)(mC)(mC)(rG)(mU)(mC)(mU)(mG)(mA)(mA)(mA)(mA)(mG)(rA)(rU)(rG) | |
| | (rU)(rG)(rC)(rC)(rG)(rC)(rA)(rA)(rC)(rG)(rC)(mU)(mC)(mU)(mG)(rC)(rC)(mU) | |
| | (mU)(mC)(mU)(rG)(rG)(rC)(rA)(rU)(mC)(mG)(mU)#(mU)#(mU)#(mA) | |
| SG-14 | (mC)#(mU)#(mG)#(mA)(mA)(rC)(rU)(rU)(mG)(mU)(mG)(rG)(mC)(rC)(rG)(rU)(rU) | 449 |
| TLR | (mU)(rA)(rC)(rG)(mU)(rC)(rG)(fG)(rU)(rU)(rG)(fU)(fA)(fG)(fC)(rU)(rC)(rC) | |
| MCV | (rC)(mG)(mA)(mA)(mA)(mC)(rG)(mU)(rU)(fG)(fC)(rU)(fA)(fC)(rA)(rA)(rU)(rA) | |
| | (rA)(rG)(rG)(fC)(fC)(rG)(fU)(fC)(fU)(mG)(mA)(mA)(mA)(fA)(fG)(rA)(rU)(rG) | |
| | (rU)(rG)(rC)(rC)(rG)(rC)(rA)(rA)(rC)(rG)(rC)(mU)(mC)(fU)(fG)(rC)(rC) | |
| | (mU)(mU)(mC)(mU)(rG)(rG)(rC)(rA)(rU)(fC)(fG)(fU)#(fU)#(mU)#(mA) | |
| SG121- | mC#mU#mG#rArArCrUrUrGrUrGrGrCrCrGrUrUrUrArCrGrUrCrGrGrUrUrGrUr | 450 |
| 0_MC | ArGrCrUrCrCrCrGrArArArCrGrUrUrGrCrUrArCrArArUrArArGrGrCrCrGrUrCr | |
| V_N2T | UrGrArArArArGrArUrGrUrGrCrCrGrCrArArCrGrCrUrCrUrGrCrCrCrCrUrUrAr | |
| S126 | ArArGrCrUrCrCrUrGrCrUrUrUrArArGrGrGrGrCrArUrCrGrUmU#mU#mA | |
| SG121- | mC#mU#mG#mAmArCrUrUrGrUrGrGrCrCrGrUrUrUrArCrGrUrCrGrGrUrUrGr | 451 |
| 2_MC | UrArGrCrUrCrCrCmGmAmAmArCrGrUrUrGrCrUrArCrArArUrArArGrGrCrCr | |
| V_N2T | GmUmCmUmGmAmAmAmAmGrArUrGrUrGrCrCrGrCrArArCrGrCrUrCrUrGr | |
| S126 | CrCmCmCmUmUmAmAmAmGmCmUmCmCmUmGmCmUmUmUmAmAmGm | |
| | GrGrGrCrArUmCmGmU#mU#mU#mA | |
| SG121- | mC#mU#mG#mAmArCrUrUmGmUmGrGmCrCrGrUrUmUrArCrGmUrCrGmGr | 452 |
| 3_MC | UrUrGmUmAmGmCrUrCrCrCmGmAmAmArCrGrUrUrGrCrUrArCrArArUrArA | |
| V_N2T | rGrGrCrCrGmUmCmUmGmAmAmAmAmGrArUrGrUrGrCrCrGrCrArArCrGrCr | |
| S126 | UrCrUrGrCrCmCmCmUmUmAmAmAmGmCmUmCmCmUmGmCmUmUmUm | |
| | AmAmGmGrGrGrCrArUmCmGmU#mU#mU#mA | |
| SG121- | mC#mU#mG#mAmAmCmUmUmGmUmGmGmCmCrGrUrUmUrArCrGmUrCrG | 453 |
| 4_MC | mGrUrUrGmUmAmGmCrUrCrCrCmGmAmAmArCrGrUrUrGrCrUrArCrArArUr | |
| V_N2T | ArArGrGrCrCrGmUmCmUmGmAmAmAmAmGrArUrGrUrGrCrCrGrCrArArCr | |
| S126 | GrCrUrCrUrGrCrCmCmCmUmUmAmAmAmGmCmUmCmCmUmGmCmUmU | |
| | mUmAmAmGmGrGrGrCrArUmCmGmU#mU#mU#mA | |
| SG121- | mC#mC#mG#rCrArArArGrCrUrGrCrArUrCrCrArCrCrCrCrCrCrGrGrUrUrGrUr | 454 |
| 0_DS12 | ArGrCrUrCrCrCrGrArArArCrGrUrUrGrCrUrArCrArArUrArArGrGrCrCrGrUrCr | |
| | UrGrArArArArGrArUrGrUrGrCrCrGrCrArArCrGrCrUrCrUrGrCrCrCrCrUrUrAr | |
| | ArArGrCrUrCrCrUrGrCrUrUrUrArArGrGrGrGrCrArUrCrGrUmU#mU#mA | |
| SG121- | mC#mC#mG#mCmArArArGrCrUrGrCrArUrCrCrArCrCrCrCrCrCrGrGrUrUrGrU | 455 |
| 2_DS12 | rArGrCrUrCrCrCmGmAmAmArCrGrUrUrGrCrUrArCrArArUrArArGrGrCrCrG | |
| | mUmCmUmGmAmAmAmAmGrArUrGrUrGrCrCrGrCrArArCrGrCrUrCrUrGrCr | |
| | CmCmCmUmUmAmAmAmGmCmUmCmCmUmGmCmUmUmUmAmAmGmG | |
| | rGrGrCrArUmCmGmU#mU#mU#mA | |
| SG121- | mC#mC#mG#mCmArArArGmCmUmGrCmArUrCrCrAmCrCrCrCmCrCrGmGrU | 456 |
| 3_DS12 | rUrGmUmAmGmCrUrCrCrCmGmAmAmArCrGrUrUrGrCrUrArCrArArUrArAr | |
| | GrGrCrCrGmUmCmUmGmAmAmAmAmGrArUrGrUrGrCrCrGrCrArArCrGrCr | |
| | UrCrUrGrCrCmCmCmUmUmAmAmAmGmCmUmCmCmUmGmCmUmUmUm | |
| | AmAmGmGrGrGrCrArUmCmGmU#mU#mU#mA | |
| SG121- | mC#mC#mG#mCmAmAmAmGmCmUmGmCmAmUrCrCrAmCrCrCrCmCrCrG | 457 |
| 4_DS12 | mGrUrUrGmUmAmGmCrUrCrCrCmGmAmAmArCrGrUrUrGrCrUrArCrArArUr | |
| | ArArGrGrCrCrGmUmCmUmGmAmAmAmAmGrArUrGrUrGrCrCrGrCrArArCr | |
| | GrCrUrCrUrGrCrCmCmCmUmUmAmAmAmGmCmUmCmCmUmGmCmUmU | |
| | mUmAmAmGmGrGrGrCrArUmCmGmU#mU#mU#mA | |
| SG121- | mU#mA#mU#rGrUrUrCrCrArGrCrUrUrCrCrUrGrGrGrUrCrUrGrCrGrUrUrGrUr | 458 |
| 0_DS22 | ArGrCrUrCrCrCrGrArArArCrGrUrUrGrCrUrArCrArArUrArArGrGrCrCrGrUrCr | |
| | UrGrArArArArGrArUrGrUrGrCrCrGrCrArArCrGrCrUrCrUrGrCrCrCrCrUrUrAr | |
| | ArArGrCrUrCrCrUrGrCrUrUrUrArArGrGrGrGrCrArUrCrGrUmU#mU#mA | |
| SG121- | mU#mA#mU#mGmUrUrCrCrArGrCrUrUrCrCrUrGrGrGrUrCrUrGrCrGrUrUrGr | 459 |
| 2_DS22 | UrArGrCrUrCrCrCmGmAmAmArCrGrUrUrGrCrUrArCrArArUrArArGrGrCrCr | |
| | GmUmCmUmGmAmAmAmAmGrArUrGrUrGrCrCrGrCrArArCrGrCrUrCrUrGr | |
| | CrCmCmCmUmUmAmAmAmGmCmUmCmCmUmGmCmUmUmUmAmAmGm | |
| | GrGrGrCrArUmCmGmU#mU#mU#mA | |
| SG121- | mU#mA#mU#mGmUrUrCrCmAmGmCrUmUrCrCrUrGmGrGrUrCmUrGrCmGr | 460 |
| 3_DS22 | UrUrGmUmAmGmCrUrCrCrCmGmAmAmArCrGrUrUrGrCrUrArCrArArUrArA | |
| | rGrGrCrCrGmUmCmUmGmAmAmAmAmGrArUrGrUrGrCrCrGrCrArArCrGrCr | |
| | UrCrUrGrCrCmCmCmUmUmAmAmAmGmCmUmCmCmUmGmCmUmUmUm | |
| | AmAmGmGrGrGrCrArUmCmGmU#mU#mU#mA | |
| SG121- | mU#mA#mU#mGmUmUmCmCmAmGmCmUmUmCrCrUrGmGrGrUrCmUrGrC | 461 |
| 4_DS22 | mGrUrUrGmUmAmGmCrUrCrCrCmGmAmAmArCrGrUrUrGrCrUrArCrArArUr | |
| | ArArGrGrCrCrGmUmCmUmGmAmAmAmAmGrArUrGrUrGrCrCrGrCrArArCr | |
| | GrCrUrCrUrGrCrCmCmCmUmUmAmAmAmGmCmUmCmCmUmGmCmUmU | |
| | mUmAmAmGmGrGrGrCrArUmCmGmU#mU#mU#mA | |
| SG121- | mG#mA#mG#rGrCrArArGrArGrGrGrCrGrGrCrUrUrUrGrGrGrCrGrGrUrUrGrUr | 462 |
| 0_DS28 | ArGrCrUrCrCrCrGrArArArCrGrUrUrGrCrUrArCrArArUrArArGrGrCrCrGrUrCr | |
| | UrGrArArArArGrArUrGrUrGrCrCrGrCrArArCrGrCrUrCrUrGrCrCrCrCrUrUrAr | |
| | ArArGrCrUrCrCrUrGrCrUrUrUrArArGrGrGrGrCrArUrCrGrUmU#mU#mA | |
| SG121- | mG#mA#mG#mGmCrArArGrArGrGrGrCrGrGrCrUrUrUrGrGrGrCrGrGrUrUrGr | 463 |
| 2_DS28 | UrArGrCrUrCrCrCmGmAmAmArCrGrUrUrGrCrUrArCrArArUrArArGrGrCrCr | |
| | GmUmCmUmGmAmAmAmAmGrArUrGrUrGrCrCrGrCrArArCrGrCrUrCrUrGr | |
| | CrCmCmCmUmUmAmAmAmGmCmUmCmCmUmGmCmUmUmUmAmAmGm | |
| | GrGrGrCrArUmCmGmU#mU#mU#mA | |
| SG121- | mG#mA#mG#mGmCrArArGmAmGmGrGmCrGrGrCrUmUrUrGrGmGrCrGmGr | 464 |
| 3_DS28 | UrUrGmUmAmGmCrUrCrCrCmGmAmAmArCrGrUrUrGrCrUrArCrArArUrArA | |
| | rGrGrCrCrGmUmCmUmGmAmAmAmAmGrArUrGrUrGrCrCrGrCrArArCrGrCr | |
| | UrCrUrGrCrCmCmCmUmUmAmAmAmGmCmUmCmCmUmGmCmUmUmUm | |
| | AmAmGmGrGrGrCrArUmCmGmU#mU#mU#mA | |
| SG121- | mG#mA#mG#mGmCmAmAmGmAmGmGmGmCmGrGrCrUmUrUrGrGmGrCr | 465 |
| 4_DS28 | GmGrUrUrGmUmAmGmCrUrCrCrCmGmAmAmArCrGrUrUrGrCrUrArCrArAr | |
| | UrArArGrGrCrCrGmUmCmUmGmAmAmAmAmGrArUrGrUrGrCrCrGrCrArAr | |
| | CrGrCrUrCrUrGrCrCmCmCmUmUmAmAmAmGmCmUmCmCmUmGmCmUm | |
| | UmUmAmAmGmGrGrGrCrArUmCmGmU#mU#mU#mA | |

### Example 2—Genome Editing Efficiency of Chemically Modified Nme crRNA and Nme tracrRNA

[0202] Chemically Modified crRNA and tracrRNA Screening Methods

[0203] Cell Culture

[0204] Screening was performed in a HEK293T stable cell line expressing the traffic light reporter (TLR) Multi-Cas Variant 1 system (TLR-MCV1). The HEK293T cells were cultured in Dulbecco-modified Eagle's Minimum Essential Medium (DMEM; Life Technologies). DMEM was also supplemented with 10% Fetal Bovine Serum (FBS; Sigma). Cells were grown in a humidified 37° C., 5% CO₂ incubator.

[0205] Traffic Light Reporter (TLR) System

[0206] The traffic light reporter (TLR) system includes a GFP (containing an insertion), followed by an out-of-frame mCherry. Upon double stranded break induction, a subset of non-homologous end-joining (NHEJ) repair events generate indels that place mCherry in frame, leading to red fluorescence. Detection of the red fluorescence is therefore a readout of editing efficiency. This system was developed and further described in Certo et al. (Nat. Methods 8, 671 (2011)). This system was further developed for testing the modified crRNAs and tracrRNAs of the disclosure. The TLR Multi-Cas Variant 1 system (TLR-MCV1) was created to introduce protospacer adjacent motifs (PAMs) to multiple alternative CRISPR enzymes (Streptococcus pyogenes (SpyCas9), Neisseria meningitidis (Nme1Cas9 and Nme2Cas9), Campylobacter jejuni (CjeCas9), Staphylococcus aureus (SauCas9), Geobacillus stearothermophilus (GeoCas9), Lachnospiraceae bacterium ND2006 (LbaCas12a), Acidaminococcus sp. (AspCas12a), and Francisella novicida (FnoCas12)) (see Iyer et al. (BioRxiv. (2019)).

[0207] The gRNAs used herein contain a 24-nucleotide guide sequence of CUGAACUUGUGGCCGUUUACGUCG (SEQ ID NO: 12), for targeting the Nme2Cas9 PAM in the TLR-MCV1 system.

[0208] Expression and Purification of Nme2Cas9

[0209] A vector expressing Nme2Cas9 from Neisseria meningitidis was used. In this construct, the Cas9 also contains three nuclear localization signals (NLSs). Rosetta DE3 strain of Escherichia coli was transformed with the 3×NLS-Nme2Cas9 construct. For expression and purification of 3×NLS-Nme2Cas9, a previously described protocol was used (Jinek et al. Science, 337: 816 (2012)). The bacterial culture was grown at 37° C. until an OD600 of 0.6 was reached. Then, the bacterial culture was cooled to 18° C., and 1 mM Isopropyl β-D-1-thiogalactopyranoside (IPTG; Sigma) was added to induce protein expression. Cells were grown overnight for 16-20 hours.

[0210] The bacterial cells were harvested and resuspended in Lysis Buffer [50 mM Tris-HCl (pH 8.0), 5 mM imidazole]. 10 μg/mL of Lysozyme (Sigma) was then added to the mixture and incubated for 30 minutes at 4° C. This was followed by the addition of 1×HALT Protease Inhibitor Cocktail (ThermoFisher). The bacterial cells were then sonicated and centrifuged for 30 minutes at 18,000 rpm. The supernatant was then subjected to Nickel affinity chromatography. The elution fractions containing the Nme2Cas9 were then further purified using cation exchange chromatography using a 5 mL HiTrap S HP column (GE). This was followed by a final round of purification by size-exclusion chromatography using a Superdex-200 column (GE). The purified protein was concentrated and flash frozen for subsequent use.

[0211] Transfection of HEK293T Cells

[0212] The HEK293T cells were nucleofected using the Neon transfection system (ThermoFisher) according to the manufacturer's protocol. Briefly, 20 picomoles of 3×NLS-Nme2Cas9 was mixed with 25 picomoles of crRNA:tracrRNA in buffer R (ThermoFisher) and incubated at room temperature for 20-30 minutes. This Cas9 RNP complex was then mixed with approximately 100,000 cells which were already resuspended in buffer R. This mixture was nucleofected with a 104 Neon tip and then plated in 24-well plates containing 500 μL of DMEM and 10% FBS. The cells were stored in a humidified 37° C. and 5% CO2 incubator for 2-3 days.

[0213] Flow Cytometry Analysis

[0214] The nucleofected HEK293T cells were analyzed on MACSQuant® VYB from Miltenyi Biotec. For mCherry detection, the yellow laser (561 nm) was used for excitation and 615/20 nm filter used to detect emission. At least 20,000 events were recorded and the subsequent analysis was performed using FlowJo® v10.4.1. Cells were first sorted based on forward and side scattering (FSC-A vs SSC-A) to eliminate debris. Cells were then gated using FSC-A and FSC-H to select single cells. Finally, mCherry signal was used to select for mCherry-expressing cells. The percent of cells expressing mCherry was calculated and reported in this application as a measure of Cas9-based genome editing.

[0215] Indel Analysis by TIDE

[0216] The genomic DNA from HEK293T cells was harvested using DNeasy Blood and Tissue kit (Qiagen) as recommended by the manufacturer. Approximately 50 ng of genomic DNA was used to PCR-amplify a ˜700 base pair fragment that was subsequently purified using a QIAquick PCR Purification kit (Qiagen). The PCR fragment was then sequenced by Sanger sequencing and the trace files were subjected to indel analysis using the TIDE web tool (Brinkman et al. Nucleic Acids Research, 42: e168 (2014)). Results are reported as % Indel rate.

[0217] Screening of Chemical Modification Patterns

[0218] Structure-guided and systematic approaches were used to introduce 2′-OMe-RNA, 2′-F-RNA, 2′-deoxy, and PS modifications throughout Nme Cas9 nuclease-compatible gRNAs. These modifications were chosen because they have been shown to improve stability, efficacy, and immunotoxicity associated with RNA. The strategy described herein yielded active RNP complexes with both extensively modified versions of crRNAs and tracrRNAs.

[0219] CRISPR RNA (crRNA) Chemical Modifications

[0220] FIG. 1 depicts a screen of 48-nucleotide long crRNA patterns CR48-2, CR48-154, CR48-155, CR48-190 to CR48205, and CR48-213 to CR48-227, each targeting the Nme2Cas9 site. An unmodified Nme tracrRNA was paired with each crRNA. The Traffic Light Reporter Multi-Cas Variant 1 (TLR-MCV1) reporter was used. 50,000 TLR-MCV cells were electroporated with 5 pmol Nme2Cas9, 13.75 pmol annealed gRNA RNPs. The graphs show the percentages of red fluorescent (RF) cells obtained by fluorescence activated cell sorting (FACS) analysis, which was performed 48 hours to 72 hours after electroporation. Data are mean values of three biological replicates and error bars represent s.e.m.

[0221] FIG. 2 depicts a screen of 42-nucleotide long crRNA patterns CR42-2, CR42-4, CR42-154 to CR42-161, CR42-167 to CR42-189, each targeting the Nme2Cas9 site. An unmodified Nme tracrRNA was paired with each crRNA. The Traffic Light Reporter Multi-Cas Variant 1 (TLR-MCV1) reporter was used. 50,000 TLR-MCV cells were electroporated with 10 pmol Nme2Cas9, 27.5 pmol annealed gRNA RNPs. The graphs show the percentages of red fluorescent (RF) cells obtained by fluorescence activated cell sorting (FACS) analysis, which was performed 48 hours to 72 hours after electroporation. Data are mean values of three biological replicates and error bars represent s.e.m.

[0222] Numerous crRNAs demonstrated efficacy similar to or greater than that of the minimally modified crRNA, CR48-2 or CR-42-2.

[0223] Based on the results of this initial screen, the CR48-199 crRNA chemical modification pattern was used as the basis to generate variants chemical modification patterns, CR48-199 V1.1 to CR48-199 V1.36. The results of the screen are depicted in FIG. 3. An unmodified Nme tracrRNA was paired with each crRNA. The TLR-MCV1 reporter was used. 50,000 TLR-MCV cells were electroporated with 5 pmol Nme2Cas9, 13.75 pmol annealed gRNA RNPs. The graphs show the percentages of RF cells obtained by FACS analysis, which was performed 48 hours to 72 hours after electroporation. Data are mean values of three biological replicates and error bars represent s.e.m.

[0224] The CR48-199 variants included 2′-deoxy RNA or 2′-O-methyl modifications at several previously unmodified positions in the crRNA repeat sequence. These positions include position 26, 33, 34, 35, 36, and 37, counting from the 5′ end of a 48-nucleotide long crRNA. Numerous crRNAs demonstrated efficacy similar to that of the CR48-199 pattern, while having a higher percentage of modified nucleotides.

[0225] Also based on the results of this initial screen, the CR48-203 crRNA chemical modification pattern was used as the basis to generate variants chemical modification patterns, CR48-203 V1.7, CR48-203 V1.10, CR48-203 V1.12, CR48-203 V1.18, CR48-203 V1.19, CR48-203 V1.22. CR48-203 V1.24, CR48-203 V1.30, CR48-203 V1.31, CR48-203 V1.34, CR48-203 V1.36, CR48-203 V1.31*. The results of the screen are depicted in FIG. 4. An unmodified Nme tracrRNA was paired with each crRNA. The TLR-MCV1 reporter was used. 50,000 TLR-MCV cells were electroporated with 5 pmol Nme2Cas9, 13.75 pmol annealed gRNA RNPs. The graphs show the percentages of RF cells obtained by FACS analysis, which was performed 48 hours to 72 hours after electroporation. Data are mean values of three biological replicates and error bars represent s.e.m.

[0226] The CR48-203 variants included 2′-deoxy RNA or 2′-O-methyl modifications at several previously unmodified positions in the crRNA repeat sequence. These positions include position 26, 33, 34, 35, 36, and 37, counting from the 5′ end of a 48-nucleotide long crRNA. Numerous crRNAs demonstrated efficacy similar to that of the CR48-203 pattern, while having a higher percentage of modified nucleotides.

[0227] TRACR RNA (tracrRNA) Chemical Modifications

[0228] FIG. 5 depicts editing efficiencies of several 93-nucleotide long Nme chemically modified tracrRNAs (TR-0, TR-1, and TR-2). A minimally modified Nme crRNA (CR48-2) was paired with each tracrRNA. The TLR-MCV1 reporter was used. The graphs show the percentages of RF cells obtained by FACS analysis. Data are mean values of three biological replicates and error bars represent s.e.m.

[0229] Each of the three chemically modified tracrRNAs demonstrated strong editing efficacy. TR-2 possessed the highest editing efficiency while also possessing the highest percentage of ribose group chemical modifications (about 47% ribose chemical modification).

[0230] Single Guide RNA (sgRNA) Chemical Modifications

[0231] FIG. 6 depicts editing efficiencies of several 103-nucleotide long Nme chemically modified single guide RNAs (sgRNAs) (SG-0 to SG-14). The TLR-MCV1 reporter cell line was used and transfected with an RNP comprising Nme2Cas9 and the gRNAs. 100,000 cells were electroporated with 10 pmol RNP (10 pmol of Nme2Cas9 and 30 pmol of sgRNA). The graphs show the percentages of RF cells obtained by FACS analysis. Data are mean values of three biological replicates and error bars represent s.e.m.

[0232] Several Nme chemically modified sgRNAs demonstrated strong editing efficacy. High editing efficiency was observed with ribose group chemical modification of up to about 47%.

### Example 3—Viral Delivery of Nme2Cas9 Paired with Chemically Modified gRNA

[0233] Viral delivery methods may be employed to deliver (i.e., express) the Cas9 nuclease in cells and, optionally, express either a crRNA portion or a tracrRNA portion. A crRNA or tracrRNA would be encoded by the viral vector and therefore be un-chemically modified. A chemically modified crRNA or tracrRNA may be co-delivered to complete the dual gRNA in cells transduced with the viral vector. For example, but in no way limiting, cells may be transduced with a viral vector (either in vivo, in vitro, or ex vivo) that expresses a Nme Cas9 nuclease (e.g., Nme2Cas9) and an Nme tracrRNA. A chemically modified Nme crRNA as described herein may be co-delivered with said viral vector, either simultaneously or sequentially. Once in cells, the chemically modified Nme crRNA would pair with the expressed tracrRNA and the Nme Cas9 nuclease, thereby permitting targeting of the Nme Cas9 to a target site in the genome of the cells. This same procedure may be employed with a viral vector encoding the Nme Cas9 co-delivered with a chemically modified sgRNA.

[0234] To test the ability to use viral vectors with co-delivered chemically modified gRNAs, 50,000 cells were transfected with a plasmid encoding the AAV genome and expressing Nme2Cas9 and a tracrRNA. 18 hours after seeding wells with the 50,000 cells, the cells were transfected with 200 ng of plasmid DNA encoding Nme2Cas9 (for chemically modified sgRNA co-delivery) or Nme2Cas9 and 93 nt tracrRNA (for chemically modified crRNA co-delivery). 18 hours later cells expressing Nme2Cas9 or Nme2Cas9/tracrRNA were collected and electroporated with 50 pmol of chemically modified sgRNA or chemically modified crRNA. The electroporated cells were incubated for an additional 24 hours before analysis of mCherry signal by flow cytometry.

[0235] 50 pmole of either sgRNAs SG-1 or SG-5, or crRNAs CR-0, CR-2, CR-4, and CR-128 were co-delivered. CR-4 is based on the chemical modification pattern in SG-5 over the crRNA portion and is 42-nucleotides in length.

[0236] As show in FIG. 7, all chemically modified gRNAs (either sgRNAs or crRNAs) demonstrated editing when combined with the AAV expressing Nme2Cas9. The AAV also expressed a tracrRNA for the crRNA experiments, but did not express a tracrRNA for the sgRNA experiments. Increasing levels of ribose chemical modification lead to higher editing efficiency. As a control, an AAV containing a U6-promoter expressed gRNA was used.

### Example 4—In Vivo Gene Editing

[0237] The various chemically modified guide RNAs have displayed substantial gene editing activity in vitro while possessing enhanced stability (e.g., serum stability). The in vivo activity of select chemically modified guide RNAs was next determined in a mouse. A mouse containing the TLR-MCV1 reporter was used in the experiments. Chemically modified sgRNA were buffer exchanged and concentrated using Amicon ultra 0.5 mL 3k MWCO to a concentration of about 230 μM (3× washes 1M NaOAc, 3× washes PBS pH7.4). RNP were formulated in 1 mL of PBS pH7.4, and incubated for 0.5 hrs. Specifically, a 1 to 2.785 Nme2cas9 to Guide molar ratio was used. RNP were further concentrated in a 4 mL Amicon filter 30k MWCO and spun at 4000 g to 35-50 μL. Finally, highly concentrated Shuttle peptide was added to the RNP mixture at a 5× molar ratio to Nme2Cas9 RNP. The resultant mixture (Nme2Cas9 RNP and shuttle peptide) was snap frozen and stored at −80° C. until use.

[0238] The shuttle peptide is a small peptide that aids in cell membrane penetration and endosomal escape. The sequence used in this study is named S10 and described in Krishnamurthy et al. (Nat Commun. 10: 4906 (2019)).

[0239] 3 uL of the RNP solution was injected Bilaterally into the striatum of TLR-MCV1 mice. After 7-days, mice were euthanized according to IACUC protocols. Dissected brains were sectioned and stained for mCherry with IHC 1 week after RNP injections.

[0240] As shown in FIG. 8, the data shows that the chemically modified sgRNAs are capable of gene editing activity in vivo.

### Example 5—Developing and Testing 121-Nucleotide Long Nme sgRNA

[0241] 103-nucleotide long Nme chemically modified sgRNAs (SG103-0) were compared against 121-nucleotide long Nme chemically modified sgRNAs (SG121-0). The sgRNAs used in the Examples are recited in Table 5.

[0242] The codelivery of mRNA and sgRNA using 103-nucleotide long Nme chemically modified sgRNAs (SG103-0) vs 121-nucleotide long Nme chemically modified sgRNAs (SG121-0) was measured. Nme2Cas9 mRNA was kept constant and end-modified synthetic sgRNA was titrated. The activity was measured and plotted in FIG. 9. The bars represent activity in the TLR-MCV cell line. Data are mean values of two biological replicates and error bars represent s.e.m.

[0243] Further modifications patterns of the 121-nucleotide long Nme chemically modified sgRNAs (SG121) were developed and tested against human HEK293T cells, and mouse Hepa1-6 cells. SG121-3, for example, is ˜45% ribose modified and supports efficient editing at multiple genomic loci. This amount of modification is expected to support in vivo editing when delivered as an LNP. FIG. 10 depicts the comparison of the activity of several of the SG121 modifications (SG121-0, SG121-2, SG121-3, and SG121-4) in targeting human TLR-MCV cell line, HEK293T cells (Linc01588, Lsp1, and FancF), and mouse Hepa1-6 cells (Ttr). SG121 modified guides were electroporated into cells with Nme2Cas9 mRNA. All of the tested sgRNAs displayed higher activity than the mock control background.

[0244] SG121-3 and SG121-0 were also tested using various Nme2-adenosine base editor (ABE) fusion proteins at the Linc01588 genomic site. These modified guide RNAs displayed substantial gene editing activity in vitro. The activities of these sgRNA were plotted as shown in FIG. 11.

[0245] To test which crRNA and tracrRNA modification patterns can extend to desired genomic sites, 100 pmol of the SG121 guides (SG121-0, and SG121-3) and of the heavily modified CR48 variants (CR48-199, CR48-203, CR48-199, 7, CR48-199, 18, and CR48-199.31) were used to target mouse TTR with 100 ng of Nme2Cas9 mRNA and tracrRNA TR97-2. crRNAs were delivered with TR97-2. TR97-2 and SG121-3's tracrRNA sequences have comparable modifications allowing comparison of editing results. The modified crRNAs showed comparable editing activities targeting mouse TTR as those observed via TLR-MCV screening (mCherry reporter cell line) (see FIG. 12). This proves that the crRNA modification patterns observed also extend to alternative genomic loci.

1. A chemically modified Neisseria meningitidis (Nme) guide RNA (gRNA) comprising:
(a) a crRNA portion comprising (i) a guide sequence capable of hybridizing to a target polynucleotide sequence, and (ii) a repeat sequence; and
(b) a tracrRNA portion comprising an anti-repeat nucleotide sequence that is complementary to the repeat sequence,
wherein the crRNA portion comprises at least 40% modified nucleotides, and
wherein the gRNA is capable of binding to an Nme Cas9 nuclease or a variant thereof.

2. The chemically modified Nme gRNA of claim 1, wherein:
the Nme Cas9 nuclease is Nme1Cas9, Nme2Cas9, or Nme3Cas9;
the gRNA is capable of binding to an Nme Cas9 nuclease or variant thereof comprising an amino acid sequence with at least 80% identity to an amino acid sequence set forth in SEQ ID NO: 1, 2, or 3;
the crRNA portion binds to an Nme Cas9 nuclease or variant thereof through one or more nucleobases at positions 2, 11, 12, 14, 17, 20, 34, 35, and 36 from the 5′ end of the crRNA portion;
the repeat sequence of the crRNA portion binds to an Nme Cas9 nuclease or variant thereof through one or more nucleobases at positions 10, 11, and 12 from the 5′ end of the repeat sequence of the crRNA portion;
the guide sequence of the crRNA portion binds to an Nme Cas9 nuclease or variant thereof through one or more nucleobases at positions 5, 8, 11, 13, 14, and 23 from the 3′ end of the guide sequence of the crRNA portion;
the tracrRNA portion comprises at least one modified nucleotide;
the modified nucleotides each independently comprise a modification of a ribose group, a phosphate group, a nucleobase, or a combination thereof;
each modification of the ribose group is independently selected from the group consisting of 2′-O-methyl, 2′-fluoro, 2′-deoxy, 2′-O-(2-methoxyethyl) (MOE), 2′-NH₂ (2′-amino), 4′-thio, a bicyclic nucleotide, a locked nucleic acid (LNA), a 2′-(S)-constrained ethyl (S-cEt), a constrained MOE, and a 2′-O,4′-C-aminomethylene bridged nucleic acid (2′,4′-BNA^{NC});
at least 50%, 80%, 90%, or 100% of the ribose groups are chemically modified;
at least 40%, 80%, 90% or 100% of the ribose groups in the guide sequence of the crRNA portion are chemically modified;
at least 40% of the ribose groups in the repeat sequence of the crRNA portion are chemically modified;
each modification of the phosphate group is independently selected from the group consisting of a phosphorothioate, phosphonoacetate (PACE), thiophosphonoacetate (thioPACE), amide, triazole, phosphonate, and phosphotriester modification; and/or
each modification of the nucleobase group is independently selected from the group consisting of 2-thiouridine, 4-thiouridine, N⁶-methyladenosine, pseudouridine, 2,6-diaminopurine, inosine, thymidine, 5-methylcytosine, 5-substituted pyrimidine, isoguanine, isocytosine, and halogenated aromatic groups.

3-20. (canceled)

21. The chemically modified Nme gRNA of claim 1, wherein:
the gRNA comprises at least 90% or 100% modified nucleotides;
at least one nucleotide of the crRNA portion comprises a 2′-deoxy chemical modification;
one or more of the nucleotides at positions 7, 26, 33, 34, 35, 36, and 37 from the 5′ end of the crRNA portion comprises a 2′-deoxy chemical modification;
one or more of the nucleotides at positions 12, 15, 16, 23, and 42 from the 3′ end of the crRNA portion comprises a 2′-deoxy chemical modification;
the nucleotide at position 7 from the 5′ end of the guide sequence of the crRNA portion comprises a 2′-deoxy chemical modification;
the nucleotide at position 18 from the 3′ end of the guide sequence of the crRNA portion comprises a 2′-deoxy chemical modification;
the nucleotides at positions 2, 9, 10, 11, 12, and 13 from the 5′ end of the repeat sequence of the crRNA portion comprises a 2′-deoxy chemical modification;
at least one nucleotide of the crRNA portion comprises a 2′-fluoro chemical modification;
one or more of the nucleotides at positions 12, 14, 16, 19, 20, and 21 from the 5′ end of the crRNA portion comprises a 2′-fluoro chemical modification;
one or more of the nucleotides at positions 28, 29, 30, 33, 35, and 37 from the 3′ end of the crRNA portion comprises a 2′-fluoro chemical modification;
one or more of the nucleotides at positions 4, 6, 9, 11, and 13 from the 3′ end of the guide sequence of the crRNA portion comprises a 2′-fluoro chemical modification;
one or more of the nucleotides at positions 1, 5, 6, 7, and 8 from the 5′ end of the repeat sequence of the crRNA portion comprise a 2′-fluoro chemical modification;
the nucleotides at positions 33 and 35 from the 3′ end of the crRNA portion comprises a 2′-fluoro chemical modification and position 42 from the 3′ end of the crRNA portion comprises a 2′-deoxy chemical modification;
the nucleotides at positions 9 and 11 from the 3′ end of the guide sequence of the crRNA portion comprises a 2′-fluoro chemical modification and position 18 from the 3′ end of the guide sequence of the crRNA portion comprises a 2′-deoxy chemical modification;
the guide sequence of the crRNA portion is between 18 and 26 nucleotides in length;
the repeat sequence of the crRNA portion is between 12 and 24 nucleotides in length;
the repeat sequence of the crRNA portion is 12, 18, or 24 nucleotides in length;
the crRNA portion is between 32 and 48 nucleotides in length; and/or
the tracrRNA portion is between 60 and 100 nucleotides in length.

22-40. (canceled)

41. The chemically modified Nme gRNA of claim 1, comprising at least one chemical modification in a crRNA portion nucleotide sequence of:
(SEQ ID NO: 8)
(N)ₓ GUUGUAGCUCCCUUUCUC (CR42);
or
(SEQ ID NO: 9)
(N)ₓ GUUGUAGCUCCCUUUCUCAUUUCG (CR48),
wherein N corresponds to any nucleotide and x corresponds to any integer between 18 and 26, optionally wherein:
the crRNA portion modification pattern selected from the group consisting of:

| | |
|---|---|
| CR48-2 | (mN)#(mN)#(mN)#(mN)(mN)(rN)(rN)(rN)(rN)(rN)(rN)(rN)(rN)(rN)(rN)(rN) |
| | (rN)(rN)(rN)(rN)(rN)(rN)(rN)(rN)(rG)(rU)(rU)(rG)(rU)(rA)(rG)(rC)(rU) |
| | (rC)(rC)(rC)(rU)(mU)(mU)(mC)((mU)(mC)(mA)(mU)(mU)#(mU)#(mC)#(mG) |
| | (SEQ ID NO: 13); |
| CR48-154 | (mN)#(mN)#(mN)#(mN)(mN)(mN)dN)#(mN)(mN)(mN)(mN)(fN)(mN)(fN)(mN)(fN) |
| | (mN)mN)(rN)(rN)(rN)(mN)(rN)(rN)(mG)(rU)(rU)(rG)(mU)(mA)(mG)(mC)(rU) |
| | (rC)(rC)(rC)(rU)(mU)(mU)(mC)(mU)(mC)(mA)(mU)(mU)#(mU)#(mC)#(mG) |
| | (SEQ ID NO: 14); |
| CR48-155 | (mN)#(mN)#(mN)#(mN)(mN)(mN)(dN)#(mN)(mN)(mN)(mN)(mN)(mN)(fN)(mN)(fN) |
| | (mN)(mN)(rN)(rN)(rN)(mN)(rN)(rN)(mG)(rU)(rU)(rG)(mU)(mA)(mG)(mC)(rU) |
| | (rC)(rC)(rC)(rU)(mU)(mU)(mC)(mU)(mC)(mA)(mU)(mU)#(mU)#(mC)#(mG) |
| | (SEQ ID NO: 15); |
| CR48-190 | (mN)#(mN)#(mN)#(mN)(mN)(mN)(dN)#(mN)(mN)(mN)(mN)(fN)(mN)(fN)(mN)(fN) |
| | (mN)(mN)(rN)(fN)(mN)(mN)(mN)(mN)(mG)(rU)(rU)(rG)(mU)(mA)(mG)(mC)(rU) |
| | (rC)(rC)(rC)(rU)(mU)(mU)(mC)(mU)(mC)(mA)(mU)(mU)#(mU)#(mC)#(mG) |
| | (SEQ ID NO: 16); |
| CR48-191 | (mN)#(mN)#(mN)#(mN)(mN)(mN)(dN)#(mN)(mN)(mN)(mN)(fN)(mN)(fN)(mN)(fN) |
| | (mN)(mN)(rN)(mN)(fN)(mN)(mN)(mN)(mG)(rU)(rU)(rG)(mU)(mA)(mG)(mC)(rU) |
| | (rC)(rC)(rC)(rU)(mU)(mU)(mC)(mU)(mC)(mA)(mU)(mU)#(mU)#(mC)#(mG) |
| | (SEQ ID NO: 17); |
| CR48-192 | (mN)#(mN)#(mN)#(mN)(mN)(mN)(dN)#(mN)(mN)(mN)(mN)(mN)(mN)(fN)(mN)(fN) |
| | (mN)(mN)(rN)(fN)(mN)(mN)(mN)(mN)(mG)(rU)(rU)(rG)(mU)(mA)(mG)(mC)(rU) |
| | (rC)(rC)(rC)(rU)(mU)(mU)(mC)(mU)(mC)(mA)(mU)(mU)#(mU)#(mC)#(mG) |
| | (SEQ ID NO: 18); |
| CR48-193 | (mN)#(mN)#(mN)#(mN)(mN)(mN)(dN)#(mN)(mN)(mN)(mN)(mN)(mN)(fN)(mN)(fN) |
| | (mN)(mN)(rN)(mN)(fN)(mN)(mN)(mN)(mG)(rU)(rU)(rG)(mU)(mA)(mG)(mC)(rU) |
| | (rC)(rC)(rC)(rU)(mU)(mU)(mC)(mU)(mC)(mA)(mU)(mU)#(mU)#(mC)#(mG) |
| | (SEQ ID NO: 19); |
| CR48-194 | (mN)#(mN)#(mN)#(mN)(mN)(mN)(dN)#(mN)(mN)(mN)(mN)(fN)(mN)(fN)(mN)(fN) |
| | (mN)(mN)(rN)#(fN)(mN)(mN)(mN)(mN)(mG)(rU)(rU)(rG)(mU)(mA)(mG)(mC)(rU) |
| | (rC)(rC)(rC)(rU)(mU)(mU)(mC)(mU)(mC)(mA)(mU)(mU)#(mU)#(mC)#(mG) |
| | (SEQ ID NO: 20); |
| CR48-195 | (mN)#(mN)#(mN)#(mN)(mN)(mN)(dN)#(mN)(mN)(mN)(mN)(fN)(mN)(fN)(mN)(fN) |
| | (mN)(mN)(rN)#(mN)(fN)(mN)(mN)(mN)(mG)(rU)(rU)(rG)(mU)(mA)(mG)(mC)(rU) |
| | (rC)(rC)(rC)(rU)(mU)(mU)(mC)(mU)(mC)(mA)(mU)(mU)#(mU)#(mC)#(mG) |
| | (SEQ ID NO: 21); |
| CR48-196 | (mN)#(mN)#(mN)#(mN)(mN)(mN)(dN)#(mN)(mN)(mN)(mN)(mN)(mN)(fN)(mN)(fN) |
| | (mN)(mN)(rN)#(fN)(mN)(mN)(mN)(mN)(mG)(rU)(rU)(rG)(mU)(mA)(mG)(mC)(rU) |
| | (rC)(rC)(rC)(rU)(mU)(mU)(mC)(mU)(mC)(mA)(mU)(mU)#(mU)#(mC)#(mG) |
| | (SEQ ID NO: 22); |
| CR48-197 | (mN)#(mN)#(mN)#(mN)(mN)(mN)(dN)#(mN)(mN)(mN)(mN)(mN)(mN)(fN)(mN)(fN) |
| | (mN)(mN)(rN)#(mN)(fN)(mN)(mN)(mN)(mG)(rU)(rU)(rG)(mU)(mA)(mG)(mC)(rU) |
| | (rC)(rC)(rC)(rU)(mU)(mU)(mC)(mU)(mC)(mA)(mU)(mU)#(mU)#(mC)#(mG) |
| | (SEQ ID NO: 23); |
| CR48-198 | (mN)#(mN)#(mN)#(mN)(mN)(mN)(dN)#(mN)(mN)(mN)(mN)(fN)(mN)(fN)(mN)(fN) |
| | (mN)(mN)(mN)(fN)(mN)(mN)(mN)(mN)(mG)(rU)(rU)(rG)(mU)(mA)(mG)(mC)(rU) |
| | (rC)(rC)(rC)(rU)(mU)(mU)(mC)(mU)(mC)(mA)(mU)(mU)#(mU)#(mC)#(mG) |
| | (SEQ ID NO: 24); |
| CR48-199 | (mN)#(mN)#(mN)#(mN)(mN)(mN)(dN)#(mN)(mN)(mN)(mN)(fN)(mN)(fN)(mN)(fN) |
| | (mN)(mN)(mN)(mN)(fN)(mN)(mN)(mN)(mG)(rU)(rU)(rG)(mU)(mA)(mG)(mC)(rU) |
| | (rC)(rC)(rC)(rU)(mU)(mU)(mC)(mU)(mC)(mA)(mU)(mU)#(mU)#(mC)#(mG) |
| | (SEQ ID NO: 25); |
| CR48-200 | (mN)#(mN)#(mN)#(mN)(mN)(mN)(dN)#(mN)(mN)(mN)(mN)(mN)(mN)(fN)(mN)(fN) |
| | (mN)(mN)(mN)(fN)(mN)(mN)(mN)(mN)(mG)(rU)(rU)(rG)(mU)(mA)(mG)(mC)(rU) |
| | (rC)(rC)(rC)(rU)(mU)(mU)(mC)(mU)(mC)(mA)(mU)(mU)#(mU)#(mC)#(mG) |
| | (SEQ ID NO: 26); |
| CR48-201 | (mN)#(mN)#(mN)#(mN)(mN)(mN)(dN)#(mN)(mN)(mN)(mN)(mN)(mN)(fN)(mN)(fN) |
| | (mN)(mN)(mN)(mN)(fN)(mN)(mN)(mN)(mG)(rU)(rU)(rG)(mU)(mA)(mG)(mC)(rU) |
| | (rC)(rC)(rC)(rU)(mU)(mU)(mC)(mU)(mC)(mA)(mU)(mU)#(mU)#(mC)#(mG) |
| | (SEQ ID NO: 27); |
| CR48-202 | (mN)#(mN)#(mN)#(mN)(mN)(mN)(dN)#(mN)(mN)(mN)(mN)(fN)(mN)(fN)(mN)(fN) |
| | (mN)(mN)(fN)(fN)(mN)(mN)(mN)(mN)(mG)(rU)(rU)(rG)(mU)(mA)(mG)(mC)(rU) |
| | (rC)(rC)(rC)(rU)(mU)(mU)(mC)(mU)(mC)(mA)(mU)(mU)#(mU)#(mC)#(mG) |
| | (SEQ ID NO: 28); |
| CR48-203 | (mN)#(mN)#(mN)#(mN)(mN)(mN)dN)#(mN)(mN)(mN)(mN)(fN)(mN)(fN)(mN)(fN) |
| | (mN)mN)(fN)(mN)(fN)(mN)(mN)(mN)(mG)(rU)(rU)(rG)(mU)(mA)(mG)(mC)(rU) |
| | (rC)(rC)(rC)(rU)(mU)(mU)(mC)(mU)(mC)(mA)(mU)(mU)#(mU)#(mC)#(mG) |
| | (SEQ ID NO: 29); |
| CR48-204 | (mN)#(mN)#(mN)#(mN)(mN)(mN)(dN)#(mN)(mN)(mN)(mN)(mN)(mN)(fN)(mN)(fN) |
| | (mN)(mN)(fN)(fN)(mN)(mN)(mN)(mN)(mG)(rU)(rU)(rG)(mU)(mA)(mG)(mC)(rU) |
| | (rC)(rC)(rC)(rU)(mU)(mU)(mC)(mU)(mC)(mA)(mU)(mU)#(mU)#(mC)#(mG) |
| | (SEQ ID NO: 30); |
| CR48-205 | (mN)#(mN)#(mN)#(mN)(mN)(mN)(dN)#(mN)(mN)(mN)(mN)(mN)(mN)(fN)(mN)(fN) |
| | (mN)(mN)(fN)(mN)(fN)(mN)(mN)(mN)(mG)(rU)(rU)(rG)(mU)(mA)(mG)(mC)(rU) |
| | (rC)(rC)(rC)(rU)(mU)(mU)(mC)(mU)(mC)(mA)(mU)(mU)#(mU)#(mC)#(mG) |
| | (SEQ ID NO: 31); |
| CR48-213 | (mN)#(mN)#(mN)#(mN)(mN)(mN)(dN)#(mN)(mN)(mN)(mN)(mN)(mN)(fN)(mN)(fN) |
| | (mN)(mN)(rN)(rN)(rN)(mN)(rN)(rN)(mG)(dT)#(rU)(mG)(mU)(mA)(mG)(mC)(rU) |
| | (rC)(rC)(rC)(rU)(mU)(mU)(mC)(mU)(mC)(mA)(mU)(mU)#(mU)#(mC)#(mG) |
| | (SEQ ID NO: 32); |
| CR48-214 | (mN)#(mN)#(mN)#(mN)(mN)(mN)(dN)#(mN)(mN)(mN)(mN)(mN)(mN)(fN)(mN)(fN) |
| | (mN)(mN)(rN)(rN)(rN)(mN)(rN)(rN)(mG)(dT)#(rU)(mG)(mU)(mA)(mG)(mC)(rU) |
| | (rC)(mC)(rC)(rU)(mU)(mU)(mC)(mU)(mC)(mA)(mU)(mU)#(mU)#(mC)#(mG) |
| | (SEQ ID NO: 33); |
| CR48-215 | (mN)#(mN)#(mN)#(mN)(mN)(mN)(dN)#(mN)(mN)(mN)(mN)(mN)(mN)(fN)(mN)(fN) |
| | (mN)(mN)(rN)(rN)(rN)(mN)(rN)(rN)(mG)(dT)#(rU)(mG)(mU)(mA)(mG)(mC)(rU) |
| | (rC)(rC)(mC)(rU)(mU)(mU)(mC)(mU)(mC)(mA)(mU)(mU)#(mU)#(mC)#(mG) |
| | (SEQ ID NO: 34); |
| CR48-216 | (mN)#(mN)#(mN)#(mN)(mN)(mN)(dN)#(mN)(mN)(mN)(mN)(mN)(mN)(fN)(mN)(fN) |
| | (mN)(mN)(rN)(rN)(rN)(mN)(rN)(rN)(mG)(dT)#(rU)(mG)(mU)(mA)(mG)(mC)(rU) |
| | (rC)(mC)(mC)(rU)(mU)(mU)(mC)(mU)(mC)(mA)(mU)(mU)#(mU)#(mC)#(mG) |
| | (SEQ ID NO: 35); |
| CR48-217 | (mN)#(mN)#(mN)#(mN)(mN)(mN)(dN)#(mN)(mN)(mN)(mN)(mN)(mN)(fN)(mN)(fN) |
| | (mN)(mN)(rN)(rN)(rN)(mN)(rN)(rN)(mG)(rU)(rU)(rG)(mU)(mA)(mG)(mC)(dT) |
| | #(rC)(rC)(rC)(rU)(mU)(mU)(mC)(mU)(mC)(mA)(mU)(mU)#(mU)#(mC)#(mG) |
| | (SEQ ID NO: 36); |
| CR48-218 | (mN)#(mN)#(mN)#(mN)(mN)(mN)(dN)#(mN)(mN)(mN)(mN)(mN)(mN)(fN)(mN)(fN) |
| | (mN)(mN)(rN)(rN)(rN)(mN)(rN)(rN)(mG)(rU)(rU)(rG)(mU)(mA)(mG)(mC)(rU) |
| | (dC)#(rC)(rC)(rU)(mU)(mU)(mC)(mU)(mC)(mA)(mU)(mU)#(mU)#(mC)#(mG) |
| | (SEQ ID NO: 37); |
| CR48-219 | (mN)#(mN)#(mN)#(mN)(mN)(mN)(dN)#(mN)(mN)(mN)(mN)(mN)(mN)(fN)(mN)(fN) |
| | (mN)(mN)(rN)(rN)(rN)(mN)(rN)(rN)(mG)(rU)(rU)(rG)(mU)(mA)(mG)(mC)(rU) |
| | (rC)(dC)#(rC)(rU)(mU)(mU)(mC)(mU)(mC)(mA)(mU)(mU)#(mU)#(mC)#(mG) |
| | (SEQ ID NO: 38); |
| CR48-220 | (mN)#(mN)#(mN)#(mN)(mN)(mN)(dN)#(mN)(mN)(mN)(mN)(mN)(mN)(fN)(mN)(fN) |
| | (mN)(mN)(rN)(rN)(rN)(mN)(rN)(rN)(mG)(rU)(rU)(rG)(mU)(mA)(mG)(mC)(rU) |
| | (rC)(rC)(dC)#(rU)(mU)(mU)(mC)(mU)(mC)(mA)(mU)(mU)#(mU)#(mC)#(mG) |
| | (SEQ ID NO: 39); |
| CR48-221 | (mN)#(mN)#(mN)#(mN)(mN)(mN)(dN)#(mN)(mN)(mN)(mN)(mN)(mN)(fN)(mN)(fN) |
| | (mN)(mN)(rN)(rN)(rN)(mN)(rN)(rN)(mG)(rU)(rU)(rG)(mU)(mA)(mG)(mC)(rU) |
| | (rC)(rC)(rC)(dT)#(mU)(mU)(mC)(mU)(mC)(mA)(mU)(mU)#(mU)#(mC)#(mG) |
| | (SEQ ID NO: 40); |
| CR48-222 | (mN)#(mN)#(mN)#(mN)(mN)(mN)(dN)#(mN)(mN)(mN)(mN)(mN)(mN)(fN)(mN)(fN) |
| | (mN)(mN)(rN)(rN)(rN)(mN)(rN)(rN)(mG)(rU)(rU)(rG)(mU)(mA)(mG)(mC)(dT) |
| | #(rC)(dC)#(rC)(dT)#(mU)(mU)(mC)(mU)(mC)(mA)(mU)(mU)#(mU)#(mC)#(mG) |
| | (SEQ ID NO: 41); |
| CR48-223 | (mN)#(mN)#(mN)#(mN)(mN)(mN)(dN)#(mN)(mN)(mN)(mN)(mN)(mN)(fN)(mN)(fN) |
| | (mN)(mN)(rN)(rN)(rN)(mN)(rN)(rN)(mG)(dT)#(rU)(rG)(mU)(mA)(mG)(mC)(dT) |
| | #(dC)#(dC)#(rC)(dT)#(mU)(mU)(mC)(mU)(mC)(mA)(mU)(mU)#(mU)#(mC)#(mG) |
| | (SEQ ID NO: 42); |
| CR48-224 | (mN)#(mN)#(mN)#(mN)(mN)(mN)(dN)#(mN)(mN)(mN)(mN)(mN)(mN)(fN)(mN)(fN) |
| | (mN)(mN)(rN)(rN)(rN)(mN)(rN)(rN)(mG)(dT)#(rU)(mG)(mU)(mA)(mG)(mC)(dT) |
| | #(rC)(mC)(rC)(dT)#(mU)(mU)(mC)(mU)(mC)(mA)(mU)(mU)#(mU)#(mC)#(mG) |
| | (SEQ ID NO: 43); |
| CR48-225 | (mN)#(mN)#(mN)#(mN)(mN)(mN)(dN)#(mN)(mN)(mN)(mN)(mN)(mN)(fN)(mN)(fN) |
| | (mN)(mN)(rN)(rN)(rN)(mN)(rN)(rN)(mG)(dT)#(rU)(mG)(mU)(mA)(mG)(mC)(dT) |
| | #(rC)(dC)#(mC)(dT)#(mU)(mU)(mC)(mU)(mC)(mA)(mU)(mU)#(mU)#(mC)#(mG) |
| | (SEQ ID NO: 44); |
| CR48-226 | (mN)#(mN)#(mN)#(mN)(mN)(mN)(dN)#(mN)(mN)(mN)(mN)(mN)(mN)(fN)(mN)(fN) |
| | (mN)(mN)(rN)(rN)(rN)(mN)(rN)(rN)(mG)(dT)#(rU)(mG)(mU)(mA)(mG)(mC)(dT) |
| | #(rC)(mC)(mC)(dT)#(mU)(mU)(mC)(mU)(mC)(mA)(mU)(mU)#(mU)#(mC)#(mG) |
| | (SEQ ID NO: 45); |
| CR48-227 | (mN)#(mN)#(mN)#(mN)(mN)(mN)(dN)#(mN)(mN)(mN)(mN)(mN)(mN)(fN)(mN)(fN) |
| | (mN)(mN)(rN)(rN)(rN)(mN)(rN)(rN)(mG)(dT)#(rU)(mG)(mU)(mA)(mG)(mC)(dT) |
| | #(dC)#(mC)(mC)dT)#(mU)(mU)(mC)(mU)(mC)(mA)(mU)(mU)#(mU)#(mC)#(mG) |
| | (SEQ ID NO: 46); |
| CR48-199- | (mN)#(mN)#(mN)#(mN)(mN)(mN)(dN)#(mN)(mN)(mN)(mN)(fN)(mN)(fN)(mN)(fN) |
| V1.1 | (mN)(mN)(mN)(mN)(fN)(mN)(mN)(mN)(mG)(rU)(rU)(mG)(mU)(mA)(mG)(mC)(rU) |
| | (rC)(rC)(dC)#(rU)(mU)(mU)(mC)(mU)(mC)(mA)(mU)(mU)#(mU)#(mC)#(mG) |
| | (SEQ ID NO: 47); |
| CR48-199- | (mN)#(mN)#(mN)#(mN)(mN)(mN)(dN)#(mN)(mN)(mN)(mN)(fN)(mN)(fN)(mN)(fN) |
| V1.2 | ((mN)mN)(mN)(mN)(fN)(mN)(mN)(mN)(mG)(rU)(rU)(mG)(mU)(mA)(mG)(mC)(rU) |
| | (rC)(dC)#(rC)(rU)(mU)(mU)(mC)(mU)(mC)(mA)(mU)(mU)#(mU)#(mC)#(mG) |
| | (SEQ ID NO: 48); |
| CR48-199- | (mN)#(mN)#(mN)#(mN)(mN)(mN)(dN)#(mN)(mN)(mN)(mN)(fN)(mN)(fN)(mN)(fN) |
| V1.3 | (mN)(mN)(mN)(mN)(fN)(mN)(mN)(mN)(mG)(rU)(rU)(mG)(mU)(mA)(mG)(mC)(rU) |
| | (rC)(rC)(rC)(dT)#(mU)(mU)(mC)(mU)(mC)(mA)(mU)(mU)#(mU)#(mC)#(mG) |
| | (SEQ ID NO: 49); |
| CR48-199- | (mN)#(mN)#(mN)#(mN)(mN)(mN)(dN)#(mN)(mN)(mN)(mN)(fN)(mN)(fN)(mN)(fN) |
| V1.4 | (mN)(mN)(mN)(mN)(fN)(mN)(mN)(mN)(mG)(rU)(rU)(mG)(mU)(mA)(mG)(mC)(rU) |
| | (rC)(mC)(rC)(rU)(mU)(mU)(mC)(mU)(mC)(mA)(mU)(mU)#(mU)#(mC)#(mG) |
| | (SEQ ID NO: 50); |
| CR48-199- | (mN)#(mN)#(mN)#(mN)(mN)(mN)(dN)#(mN)(mN)(mN)(mN)(fN)(mN)(fN)(mN)(fN) |
| V1.5 | (mN)(mN)(mN)(mN)(fN)(mN)(mN)(mN)(mG)(rU)(rU)(mG)(mU)(mA)(mG)(mC)(rU) |
| | (rC)(dC)#(dC)#(rU)(mU)(mU)(mC)(mU)(mC)(mA)(mU)(mU)#(mU)#(mC)#(mG) |
| | (SEQ ID NO: 51); |
| CR48-199- | (mN)#(mN)#(mN)#(mN)(mN)(mN)(dN)#(mN)(mN)(mN)(mN)(fN)(mN)(fN)(mN)(fN) |
| V1.6 | (mN)(mN)(mN)(mN)(fN)(mN)(mN)(mN)(mG)(rU)(rU)(mG)(mU)(mA)(mG)(mC)(rU) |
| | (rC)(dC)#(rC)(dT)#(mU)(mU)(mC)(mU)(mC)(mA)(mU)(mU)#(mU)#(mC)#(mG) |
| | (SEQ ID NO: 52); |
| CR48-199- | (mN)#(mN)#(mN)#(mN)(mN)(mN)(dN)#(mN)(mN)(mN)(mN)(fN)(mN)(fN)(mN)(fN) |
| V1.7 | (mN)(mN)(mN)(mN)(fN)(mN)(mN)(mN)(mG)(rU)(rU)(mG)(mU)(mA)(mG)(mC)(rU) |
| | (rC)(dC)#(dC)#(dT)#(mU)(mU)(mC)(mU)(mC)(mA)(mU)(mU)#(mU)#(mC)#(mG) |
| | (SEQ ID NO: 53); |
| CR48-199- | (mN)#(mN)#(mN)#(mN)(mN)(mN)(dN)#(mN)(mN)(mN)(mN)(fN)(mN)(fN)(mN)(fN) |
| V1.8 | (mN)(mN)(mN)(mN)(fN)(mN)(mN)(mN)(mG)(rU)(rU)(mG)(mU)(mA)(mG)(mC)(rU) |
| | (rC)(mC)(dC)#(rU)(mU)(mU)(mC)(mU)(mC)(mA)(mU)(mU)#(mU)#(mC)#(mG) |
| | (SEQ ID NO: 54); |
| CR48-199- | (mN)#(mN)#(mN)#(mN)(mN)(mN)(dN)#(mN)(mN)(mN)(mN)(fN)(mN)(fN)(mN)(fN) |
| V1.9 | (mN)(mN)(mN)(mN)(fN)(mN)(mN)(mN)(mG)(rU)(rU)(mG)(mU)(mA)(mG)(mC)(rU) |
| | (rC)(mC)(rC)(dT)#(mU)(mU)(mC)(mU)(mC)(mA)(mU)(mU)#(mU)#(mC)#(mG) |
| | (SEQ ID NO: 55); |
| CR48-199- | (mN)#(mN)#(mN)#(mN)(mN)(mN)(dN)#(mN)(mN)(mN)(mN)(fN)(mN)(fN)(mN)(fN) |
| V1.10 | (mN)(mN)(mN)(mN)(fN)(mN)(mN)(mN)(mG)(rU)(rU)(mG)(mU)(mA)(mG)(mC)(rU) |
| | (rC)(mC)(dC)#(dT)#(mU)(mU)(mC)(mU)(mC)(mA)(mU)(mU)#(mU)#(mC)#(mG) |
| | (SEQ ID NO: 56); |
| CR48-199- | (mN)#(mN)#(mN)#(mN)(mN)(mN)(dN)#(mN)(mN)(mN)(mN)(fN)(mN)(fN)(mN)(fN) |
| V1.11 | (mN)(mN)(mN)(mN)(fN)(mN)(mN)(mN)(mG)(rU)(rU)(mG)(mU)(mA)(mG)(mC)(rU) |
| | (rC)(mC)(mC)(rU)(mU)(mU)(mC)(mU)(mC)(mA)(mU)(mU)#(mU)#(mC)#(mG) |
| | (SEQ ID NO: 57); |
| CR48-199- | (mN)#(mN)#(mN)#(mN)(mN)(mN)(dN)#(mN)(mN)(mN)(mN)(fN)(mN)(fN)(mN)(fN) |
| V1.12 | (mN)(mN)(mN)(mN)(fN)(mN)(mN)(mN)(mG)(rU)(rU)(mG)(mU)(mA)(mG)(mC)(rU) |
| | (rC)(mC)(mC)(dT)#(mU)(mU)(mC)(mU)(mC)(mA)(mU)(mU)#(mU)#(mC)#(mG) |
| | (SEQ ID NO: 58); |
| CR48-199- | (mN)#(mN)#(mN)#(mN)(mN)(mN)(dN)#(mN)(mN)(mN)(mN)(fN)(mN)(fN)(mN)(fN) |
| V1.13 | (mN)(mN)(mN)(mN)(fN)(mN)(mN)(mN)(mG)(rU)(rU)(mG)(mU)(mA)(mG)(mC)(dT) |
| | #(rC)(rC)(dC)#(rU)(mU)(mU)(mC)(mU)(mC)(mA)(mU)(mU)#(mU)#(mC)#(mG) |
| | (SEQ ID NO: 59); |
| CR48-199- | (mN)#(mN)#(mN)#(mN)(mN)(mN)(dN)#(mN)(mN)(mN)(mN)(fN)(mN)(fN)(mN)(fN) |
| V1.14 | (mN)(mN)(mN)(mN)(fN)(mN)(mN)(mN)(mG)(rU)(rU)(mG)(mU)(mA)(mG)(mC)(dT) |
| | #(rC)(dC)#(rC)(rU)(mU)(mU)(mC)(mU)(mC)(mA)(mU)(mU)#(mU)#(mC)#(mG) |
| | (SEQ ID NO: 60); |
| CR48-199- | (mN)#(mN)#(mN)#(mN)(mN)(mN)(dN)#(mN)(mN)(mN)(mN)(fN)(mN)(fN)(mN)(fN) |
| V1.15 | (mN)(mN)(mN)(mN)(fN)(mN)(mN)(mN)(mG)(rU)(rU)(mG)(mU)(mA)(mG)(mC)(dT) |
| | #(rC)(rC)(rC)(dT)#(mU)(mU)(mC)(mU)(mC)(mA)(mU)(mU)#(mU)#(mC)#(mG) |
| | (SEQ ID NO: 61); |
| CR48-199- | (mN)#(mN)#(mN)#(mN)(mN)(mN)(dN)#(mN)(mN)(mN)(mN)(fN)(mN)(fN)(mN)(fN) |
| V1.16 | (mN)(mN)(mN)(mN)(fN)(mN)(mN)(mN)(mG)(rU)(rU)(mG)(mU)(mA)(mG)(mC)(dT) |
| | #(rC)(mC)(rC)(rU)(mU)(mU)(mC)(mU)(mC)(mA)(mU)(mU)#(mU)#(mC)#(mG) |
| | (SEQ ID NO: 62); |
| CR48-199- | (mN)#(mN)#(mN)#(mN)(mN)(mN)(dN)#(mN)(mN)(mN)(mN)(fN)(mN)(fN)(mN)(fN) |
| V1.17 | (mN)(mN)(mN)(mN)(fN)(mN)(mN)(mN)(mG)(rU)(rU)(mG)(mU)(mA)(mG)(mC)(dT) |
| | #(rC)(dC)#(dC)#(rU)(mU)(mU)(mC)(mU)(mC)(mA)(mU)(mU)#(mU)#(mC)#(mG) |
| | (SEQ ID NO: 63); |
| CR48-199- | (mN)#(mN)#(mN)#(mN)(mN)(mN)(dN)#(mN)(mN)(mN)(mN)(fN)(mN)(fN)(mN)(fN) |
| V1.18 | (mN)(mN)(mN)(mN)(fN)(mN)(mN)(mN)(mG)(rU)(rU)(mG)(mU)(mA)(mG)(mC)(dT) |
| | #(rC)(dC)#(rC)(dT)#(mU)(mU)(mC)(mU)(mC)(mA)(mU)(mU)#(mU)#(mC)#(mG) |
| | (SEQ ID NO: 64); |
| CR48-199- | (mN)#(mN)#(mN)#(mN)(mN)(mN)dN)#(mN)(mN)(mN)(mN)(fN)(mN)(fN)(mN)(fN) |
| V1.19 | (mN)mN)(mN)(mN)(fN)(mN)(mN)(mN)(mG)(rU)(rU)(mG)(mU)(mA)(mG)(mC)(dT) |
| | #(rC)(dC)#(dC)#(dT)#(mU)(mU)(mC)(mU)(mC)(mA)(mU)(mU)#(mU)#(mC)#(mG) |
| | (SEQ ID NO: 65); |
| CR48-199- | (mN)#(mN)#(mN)#(mN)(mN)(mN)(dN)#(mN)(mN)(mN)(mN)(fN)(mN)(fN)(mN)(fN) |
| V1.20 | (mN)(mN)(mN)(mN)(fN)(mN)(mN)(mN)(mG)(rU)(rU)(mG)(mU)(mA)(mG)(mC)(dT) |
| | #(rC)(mC)(dC)#(rU)(mU)(mU)(mC)(mU)(mC)(mA)(mU)(mU)#(mU)#(mC)#(mG) |
| | (SEQ ID NO: 66); |
| CR48-199- | (mN)#(mN)#(mN)#(mN)(mN)(mN)(dN)#(mN)(mN)(mN)(mN)(fN)(mN)(fN)(mN)(fN) |
| V1.21 | (mN)(mN)(mN)(mN)(fN)(mN)(mN)(mN)(mG)(rU)(rU)(mG)(mU)(mA)(mG)(mC)(dT) |
| | #(rC)(mC)(rC)(dT)#(mU)(mU)(mC)(mU)(mC)(mA)(mU)(mU)#(mU)#(mC)#(mG) |
| | (SEQ ID NO: 67); |
| CR48-199- | (mN)#(mN)#(mN)#(mN)(mN)(mN)(dN)#(mN)(mN)(mN)(mN)(fN)(mN)(fN)(mN)(fN) |
| V1.22 | (mN)(mN)(mN)(mN)(fN)(mN)(mN)(mN)(mG)(rU)(rU)(mG)(mU)(mA)(mG)(mC)(dT) |
| | #(rC)(mC)(dC)#(dT)#(mU)(mU)(mC)(mU)(mC)(mA)(mU)(mU)#(mU)#(mC)#(mG) |
| | (SEQ ID NO: 68); |
| CR48-199- | (mN)#(mN)#(mN)#(mN)(mN)(mN)(dN)#(mN)(mN)(mN)(mN)(fN)(mN)(fN)(mN)(fN) |
| V1.23 | (mN)(mN)(mN)(mN)(fN)(mN)(mN)(mN)(mG)(rU)(rU)(mG)(mU)(mA)(mG)(mC)(dT) |
| | #(rC)(mC)(mC)(rU)(mU)(mU)(mC)(mU)(mC)(mA)(mU)(mU)#(mU)#(mC)#(mG) |
| | (SEQ ID NO: 69); |
| CR48-199- | (mN)#(mN)#(mN)#(mN)(mN)(mN)(dN)#(mN)(mN)(mN)(mN)(fN)(mN)(fN)(mN)(fN) |
| V1.24 | (mN)(mN)(mN)(mN)(fN)(mN)(mN)(mN)(mG)(rU)(rU)(mG)(mU)(mA)(mG)(mC)(dT) |
| | #(rC)(mC)(mC)(dT)#(mU)(mU)(mC)(mU)(mC)(mA)(mU)(mU)#(mU)#(mC)#(mG) |
| | (SEQ ID NO: 70); |
| CR48-199- | (mN)#(mN)#(mN)#(mN)(mN)(mN)(dN)#(mN)(mN)(mN)(mN)(fN)(mN)(fN)(mN)(fN) |
| V1.25 | (mN)(mN)(mN)(mN)(fN)(mN)(mN)(mN)(mG)(dT)#(rU)(mG)(mU)(mA)(mG)(mC)(dT) |
| | #(rC)(rC)(dC)#(rU)(mU)(mU)(mC)(mU)(mC)(mA)(mU)(mU)#(mU)#(mC)#(mG) |
| | (SEQ ID NO: 71); |
| CR48-199- | (mN)#(mN)#(mN)#(mN)(mN)(mN)(dN)#(mN)(mN)(mN)(mN)(fN)(mN)(fN)(mN)(fN) |
| V1.26 | (mN)(mN)(mN)(mN)(fN)(mN)(mN)(mN)(mG)(dT)#(rU)(mG)(mU)(mA)(mG)(mC)(dT) |
| | #(rC)(dC)#(rC)(rU)(mU)(mU)(mC)(mU)(mC)(mA)(mU)(mU)#(mU)#(mC)#(mG) |
| | (SEQ ID NO: 72); |
| CR48-199- | (mN)#(mN)#(mN)#(mN)(mN)(mN)(dN)#(mN)(mN)(mN)(mN)(fN)(mN)(fN)(mN)(fN) |
| V1.27 | (mN)(mN)(mN)(mN)(fN)(mN)(mN)(mN)(mG)(dT)#(rU)(mG)(mU)(mA)(mG)(mC)(dT) |
| | #(rC)(rC)(rC)(dT)#(mU)(mU)(mC)(mU)(mC)(mA)(mU)(mU)#(mU)#(mC)#(mG) |
| | (SEQ ID NO: 73); |
| CR48-199- | (mN)#(mN)#(mN)#(mN)(mN)(mN)(dN)#(mN)(niN)(mN)(mN)(fN)(mN)(fN)(mN)(fN) |
| V1.28 | (mN)(mN)(mN)(mN)(fN)(mN)(mN)(mN)(mG)(dT)#(rU)(mG)(mU)(mA)(mG)(mC)(dT) |
| | #(rC)(mC)(rC)(rU)(mU)(mU)(mC)(mU)(mC)(mA)(mU)(mU)#(mU)#(mC)#(mG) |
| | (SEQ ID NO: 74); |
| CR48-199- | (mN)#(mN)#(mN)#(mN)(mN)(mN)(dN)#(mN)(niN)(mN)(mN)(fN)(mN)(fN)(mN)(fN) |
| V1.29 | (mN)(mN)(mN)(mN)(fN)(mN)(mN)(mN)(mG)(dT)#(rU)(mG)(mU)(mA)(mG)(mC)(dT) |
| | #(rC)(dC)#(dC)#(rU)(mU)(mU)(mC)(mU)(mC)(mA)(mU)(mU)#(mU)#(mC)#(mG) |
| | (SEQ ID NO: 75); |
| CR48-199- | (mN)#(mN)#(mN)#(mN)(mN)(mN)(dN)#(mN)(niN)(mN)(mN)(fN)(mN)(fN)(mN)(fN) |
| V1.30 | (mN)(mN)(mN)(mN)(fN)(mN)(mN)(mN)(mG)(dT)#(rU)(mG)(mU)(mA)(mG)(mC)(dT) |
| | #(rC)(dC)#(rC)(dT)#(mU)(mU)(mC)(mU)(mC)(mA)(mU)(mU)#(mU)#(mC)#(mG) |
| | (SEQ ID NO: 76); |
| CR48-199- | (mN)#(mN)#(mN)#(mN)(mN)(mN)(dN)#(mN)(mN)(mN)(mN)(fN)(mN)(fN)(mN)(fN) |
| V1.31 | (mN)(mN)(mN)(mN)(fN)(mN)(mN)(mN)(mG)(dT)#(rU)(mG)(mU)(mA)(mG)(mC)(dT) |
| | #(rC)(dC)#(dC)#(dT)#(mU)(mU)(mC)(mU)(mC)(mA)(mU)(mU)#(mU)#(mC)#(mG) |
| | (SEQ ID NO: 77); |
| CR48-199- | (mN)#(mN)#(mN)#(mN)(mN)(mN)(dN)#(mN)(mN)(mN)(mN)(fN)(mN)(fN)(mN)(fN) |
| V1.32 | (mN)(mN)(mN)(mN)(fN)(mN)(mN)(mN)(mG)(dT)#(rU)(mG)(mU)(mA)(mG)(mC)(dT) |
| | #(rC)(mC)(dC)#(rU)(mU)(mU)(mC)(mU)(mC)(mA)(mU)(mU)#(mU)#(mC)#(mG) |
| | (SEQ ID NO: 78); |
| CR48-199- | (mN)#(mN)#(mN)#(mN)(mN)(mN)(dN)#(mN)(mN)(mN)(mN)(fN)(mN)(fN)(mN)(fN) |
| V1.33 | (mN)(mN)(mN)(mN)(fN)(mN)(mN)(mN)(mG)(dT)#(rU)(mG)(mU)(mA)(mG)(mC)(dT) |
| | #(rC)(mC)(rC)(dT)#(mU)(mU)(mC)(mU)(mC)(mA)(mU)(mU)#(mU)#(mC)#(mG) |
| | (SEQ ID NO: 79); |
| CR48-199- | (mN)#(mN)#(mN)#(mN)(mN)(mN)(dN)#(mN)(mN)(mN)(mN)(fN)(mN)(fN)(mN)(fN) |
| V1.34 | (mN)(mN)(mN)(mN)(fN)(mN)(mN)(mN)(mG)(dT)#(rU)(mG)(mU)(mA)(mG)(mC)(dT) |
| | #(rC)(mC)(dC)#(dT)#(mU)(mU)(mC)(mU)(mC)(mA)(mU)(mU)#(mU)#(mC)#(mG) |
| | (SEQ ID NO: 80); |
| CR48-199- | (mN)#(mN)#(mN)#(mN)(mN)(mN)(dN)#(mN)(mN)(mN)(mN)(fN)(mN)(fN)(mN)(fN) |
| V1.35 | (mN)(mN)(mN)(mN)(fN)(mN)(mN)(mN)(mG)(dT)#(rU)(mG)(mU)(mA)(mG)(mC)(dT) |
| | #(rC)(mC)(mC)(rU)(mU)(mU)(mC)(mU)(mC)(mA)(mU)(mU)#(mU)#(mC)#(mG) |
| | (SEQ ID NO: 81); |
| CR48-199- | (mN)#(mN)#(mN)#(mN)(mN)(mN)(dN)#(mN)(mN)(mN)(mN)(fN)(mN)(fN)(mN)(fN) |
| V1.36 | (mN)(mN)(mN)(mN)(fN)(mN)(mN)(mN)(mG)(dT)#(rU)(mG)(mU)(mA)(mG)(mC)(dT) |
| | #(rC)(mC)mC)(dT)#(mU)(mU)(mC)(mU)(mC)(mA)(mU)(mU)#(mU)#(mC)#(mG) |
| | (SEQ ID NO: 82); |
| CR48-203- | (mN)#(mN)#(mN)#(mN)(mN)(mN)(dN)#(mN)(mN)(mN)(mN)(fN)(mN)(fN)(mN)(fN) |
| V1.7 | (mN)(mN)(fN)(mN)(fN)(mN)(mN)(mN)(mG)(rU)(rU)(mG)(mU)(mA)(mG)(mC)(rU) |
| | (rC)(dC)#(dC)#(dT)#(mU)(mU)(mC)(mU)(mC)(mA)(mU)(mU)#(mU)#(mC)#(mG) |
| | (SEQ ID NO: 83); |
| CR48-203- | (mN)#(mN)#(mN)#(mN)(mN)(mN)(dN)#(mN)(mN)(mN)(mN)(fN)(mN)(fN)(mN)(fN) |
| V1.10 | (mN)(mN)(fN)(mN)(fN)(mN)(mN)(mN)(mG)(rU)(rU)(mG)(mU)(mA)(mG)(mC)(rU) |
| | (rC)(mC)(dC)#(dT)#(mU)(mU)(mC)(mU)(mC)(mA)(mU)(mU)#(mU)#(mC)#(mG) |
| | (SEQ ID NO: 84); |
| CR48-203- | (mN)#(mN)#(mN)#(mN)(mN)(mN)(dN)#(mN)(mN)(mN)(mN)(fN)(mN)(fN)(mN)(fN) |
| VI.12 | (mN)(mN)(fN)(mN)(fN)(mN)(mN)(mN)(mG)(rU)(rU)(mG)(mU)(mA)(mG)(mC)(rU) |
| | (rC)(mC)(mC)(dT)#(mU)(mU)(mC)(mU)(mC)(mA)(mU)(mU)#(mU)#(mC)#(mG) |
| | (SEQ ID NO: 85); |
| CR48-203- | (mN)#(mN)#(mN)#(mN)(mN)(mN)(dN)#(mN)(mN)(mN)(mN)(fN)(mN)(fN)(mN)(fN) |
| VI.18 | (mN)(mN)(fN)(mN)(fN)(mN)(mN)(mN)(mG)(rU)(rU)(mG)(mU)(mA)(mG)(mC)(dT) |
| | #(rC)(dC)#(rC)(dT)#(mU)(mU)(mC)(mU)(mC)(mA)(mU)(mU)#(mU)#(mC)#(mG) |
| | (SEQ ID NO: 86); |
| CR48-203- | (mN)#(mN)#(mN)#(mN)(mN)(mN)(dN)#(mN)(mN)(mN)(mN)(fN)(mN)(fN)(mN)(fN) |
| V1.19 | (mN)(mN)(fN)(mN)(fN)(mN)(mN)(mN)(mG)(rU)(rU)(mG)(mU)(mA)(mG)(mC)(dT) |
| | #(rC)(dC)#(dC)#(dT)#(mU)(mU)(mC)(mU)(mC)(mA)(mU)(mU)#(mU)#(mC)#(mG) |
| | (SEQ ID NO: 87); |
| CR48-203- | (mN)#(mN)#(mN)#(mN)(mN)(mN)(dN)#(mN)(mN)(mN)(mN)(fN)(mN)(fN)(mN)(fN) |
| V1.22 | (mN)(mN)(fN)(mN)(fN)(mN)(mN)(mN)(mG)(rU)(rU)(mG)(mU)(mA)(mG)(mC)(dT) |
| | #(rC)(mC)(dC)#(dT)#(mU)(mU)(mC)(mU)(mC)(mA)(mU)(mU)#(mU)#(mC)#(mG) |
| | (SEQ ID NO: 88); |
| CR48-203- | (mN)#(mN)#(mN)#(mN)(mN)(mN)(dN)#(mN)(mN)(mN)(mN)(fN)(mN)(fN)(mN)(fN) |
| V1.24 | (mN)(mN)(fN)(mN)(fN)(mN)(mN)(mN)(mG)(rU)(rU)(mG)(mU)(mA)(mG)(mC)(dT) |
| | #(rC)(mC)(mC)(dT)#(mU)(mU)(mC)(mU)(mC)(mA)(mU)(mU)#(mU)#(mC)#(mG) |
| | (SEQ ID NO: 89); |
| CR48-203- | (mN)#(mN)#(mN)#(mN)(mN)(mN)(dN)#(mN)(mN)(mN)(mN)(fN)(mN)(fN)(mN)(fN) |
| V1.30 | (mN)(mN)(fN)(mN)(fN)(mN)(mN)(mN)(mG)(dT)#(rU)(mG)(mU)(mA)(mG)(mC)(dT) |
| | #(rC)(dC)#(rC)(dT)#(mU)(mU)(mC)(mU)(mC)(mA)(mU)(mU)#(mU)#(mC)#(mG) |
| | (SEQ ID NO: 90); |
| CR48-203- | (mN)#(mN)#(mN)#(mN)(mN)(mN)(dN)#(mN)(mN)(mN)(mN)(fN)(mN)(fN)(mN)(fN) |
| V1.31 | (mN)(mN)(fN)(mN)(fN)(mN)(mN)(mN)(mG)(dT)#(rU)(mG)(mU)(mA)(mG)(mC)(dT) |
| | #(rC)(dC)#(dC)#(dT)#(mU)(mU)(mC)(mU)(mC)(mA)(mU)(mU)#(mU)#(mC)#(mG) |
| | (SEQ ID NO: 91); |
| CR48-203- | (mN)#(mN)#(mN)#(mN)(mN)(mN)(dN)#(mN)(mN)(mN)(mN)(fN)(mN)(fN)(mN)(fN) |
| V1.34 | (mN)(mN)(fN)(mN)(fN)(mN)(mN)(mN)(mG)(dT)#(rU)(mG)(mU)(mA)(mG)(mC)(dT) |
| | #(rC)(mC)(dC)#(dT)#(mU)(mU)(mC)(mU)(mC)(mA)(mU)(mU)#(mU)#(mC)#(mG) |
| | (SEQ ID NO: 92); |
| CR48-203- | (mN)#(mN)#(mN)#(mN)(mN)(mN)(dN)#(mN)(mN)(mN)(mN)(fN)(mN)(fN)(mN)(fN) |
| V1.36 | (mN)(mN)(fN)(mN)(fN)(mN)(mN)(mN)(mG)(dT)#(rU)(mG)(mU)(mA)(mG)(mC)(dT) |
| | #(rC)(mC)(mC)(dT)#(mU)(mU)(mC)(mU)(mC)(mA)(mU)(mU)#(mU)#(mC)#(mG) |
| | (SEQ ID NO: 93) |

wherein rN=RNA, mN=2′-O-methyl RNA, fN=2′-fluoro RNA, dN=2′-deoxy RNA, N #N=phosphorothioate linkage, and N=any nucleotide, optionally wherein:
the chemically modified Nme gRNA comprises a tracrRNA portion nucleotide sequence of:
(SEQ ID NO: 10)
CGAAAUGAGAACCGUUGCUACAAUAAGGCCGUCUGAAAAGAUGUGCCGCA
ACGCUCUGCCCCUUAAAGCUUCUGCUUUAAGGGGCAUCGUUUA
(TR93);
or
(SEQ ID NO: 11)
AGAACCGUUGCUACAAUAAGGCCGUCUGAAAAGAUGUGCCGCAACGCUCU
GCCCCUUAAAGCUCCUGCUUUAAGGGGCAUCGUUUA (TR87),
optionally wherein tracrRNA portion modification
pattern selected from any one of:
(SEQ ID NO: 94)
(mC)#(mG)#(mA)#(rA)(rA)(rU)(rG)(rA)(rG)(rA)(rA)
(rC)(rC)(rG)(rU)(rU)(rG))(rC)(rU)(rA)(rC)(rA)
(rA)(rU)(rA)(rA)(rG)(rG)(rC)(rC)(rG)(rU)(rC)(rU)
(rG)(rA)(rA)(rA)(rA)(rG)(rA)(rU)(rG)(rU)(rG)(rC)
(rC)(rG)(rC)(rA)(rA)(rC)(rG)(rC)(rU)(rC)(rU)(rG)
(rC)(rC)(rC)(rC)(rU)(rU)(rA)(rA)(rA)(rG)(rC)(rU)
(rC)(rC)(rU)(rG)(rC)(rU)(rU)(rU)(rA)(rA)(rG)(rG)
(rG)(rG)(rC)(rA)(rU)(rC)(rG)(rU)#(mU)#(mU)#(mA)
(TR93-0);
(SEQ ID NO: 95)
(mC)#(mG)#(mA)#(rA)(rA)(rU)(rG)(rA)(rG)(rA)(rA)
(rC)(rC)(rG)(rU)(rU)(rG)(rC)(rU)(rA)(rC)(rA)
(rA)(rU)(rA)(rA)(rG)(rG)(rC)(rC)(rG)(rU)(rC)(rU)
(mG)(mA)(mA)(mA)(rA)(rG)(rA)(rU)(rG)(rU)(rG)(rC)
(rC)(rG)(rC)(rA)(rA)(rC)(rG)(rC)(rU)(rC)(rU)(rG)
(rC)(rC)(rC)(rC)(rU)(rU)(rA)(rA)(rA)(rG)(rC)(mU)
(mC)(mC)(mU)(rG)(rC)(rU)(rU)(rU)(rA)(rA)(rG)(rG)
(rG)(rG)(rC)(rA)(rU)(rC)(rG)(rU)#(mU)#(mU)#(mA)
(TR93-1);
(SEQ ID NO: 96)
(mC)#(mG)#(mA)#(mA)(mA)(mU)(mG)(mA)(mG)(mA)(mA)
(mC)(rC)(rG)(rU)(rU)(rG)(rC)(rU)(rA)(rC)(rA)
(rA)(rU)(rA)(rA)(rG)(rG)(rC)(rC)(rG)(mU)(mC)(mU)
(mG)(mA)(mA)(mA)(mA)(mG)(rA)(rU)(rG)(rU)(rG)(rC)
(rC)(rG)(rC)(rA)(rA)(rC)(rG)(rC)(rU)(rC)(rU)(rG)
(rC)(rC)(mC)(mC)(mU)(mU)(mA)(mA)(mA)(mG)(mC)(mU)
(mC)(mC)(mU)(mG)(mC)(mU)(mU)(mU)(mA)(mA)(mG)(mG)
(rG)(rG)(rC)(rA)(rU)(mC)(mG)(mU)#(mU)#(mU)#(mA)
(TR93-2),
wherein rN=RNA, mN=2′-O-methyl RNA, fN=2′-fluoro RNA, N #N=phosphorothioate linkage, and N=any nucleotide.

42-45. (canceled)

46. The chemically modified Nme gRNA of claim 41, wherein:
the tracrRNA portion comprises one or more modified nucleotides each independently selected from a modification of a ribose group, a phosphate group, a nucleobase, or a combination thereof, optionally wherein:
each modification of the ribose group is independently selected from the group consisting of 2′-O-methyl, 2′-fluoro, 2′-deoxy, 2′-O-(2-methoxyethyl) (MOE), 2′-NH₂ (2′-amino), 4′-thio, a bicyclic nucleotide, a locked nucleic acid (LNA), a 2′-(S)-constrained ethyl (5-cEt), a constrained MOE, and a 2′-O,4′-C-aminomethylene bridged nucleic acid (2′,4′-BNA^{Nc}), optionally wherein:
at least 40%, 80%, or 100% of the ribose groups are chemically modified, optionally wherein:
each modification of the phosphate group is independently selected from the group consisting of a phosphorothioate, phosphonoacetate (PACE), thiophosphonoacetate (thioPACE), amide, triazole, phosphonate, and phosphotriester modification, optionally wherein:
each modification of the nucleobase group is independently selected from the group consisting of 2-thiouridine, 4-thiouridine, N⁶-methyladenosine, pseudouridine, 2,6-diaminopurine, inosine, thymidine, 5-methylcytosine, 5-substituted pyrimidine, isoguanine, isocytosine, and halogenated aromatic groups.

47-52. (canceled)

53. The chemically modified Nme gRNA of claim 41, wherein tracrRNA portion comprises at least 40%, 80%, 90%, or 100% modified nucleotides, optionally wherein the tracrRNA portion modification pattern selected from any one of:
(SEQ ID NO: 94)
(mC)#(mG)#(mA)#(rA)(rA)(rU)(rG)(rA)(rG)(rA)(rA)
(rC)(rC)(rG)(rU)(rU)(rG)(rC)(rU)(rA)(rC)(rA)
(rA)(rU)(rA)(rA)(rG)(rG)(rC)(rC)(rG)(rU)(rC)(rU)
(rG)(rA)(rA))(rA)(rA)(rG)(rA)(rU)(rG)(rU)(rG)
(rC)(rC)(rG)(rC)(rA)(rA)(rC)(rG)(rC)(rU)(rC)(rU)
(rG)(rC)(rC)(rC)(rC)(rU)(rU)(rA)(rA)(rA)(rG)(rC)
(rU)(rC)(rC)(rU)(rG)(rC)(rU)(rU)(rU)(rA)(rA)(rG)
(rG)(rG)(rG)(rC)(rA)(rU)(rC)(rG)(rU)#(mU)#(mU)#
(mA) (TR93-0):
(SEP ID NO: 95)
(mC)#(mG)#(mA)#(rA)(rA)(rU)(rG)(rA)(rG)(rA)(rA)
(rC)(rC)(rG)(rU)(rU)(rG)(rC)(rU)(rA)(rC)(rA)
(rA)(rU)(rA)(rA)(rG)(rG)(rC)(rC)(rG)(rU)(rC)(rU)
(mG)(mA)(mA)(mA)(rA)(rG)(rA)(rU)(rG)(rU)(rG)(rC)
(rC)(rG)(rC)(rA)(rA)(rC)(rG)(rC)(rU)(rC)(rU)(rG)
(rC)(rC)(rC)(rC)(rU)(rU)(rA)(rA)(rA)(rG)(rC)(mU)
(mC)(mC)(mU)(rG)(rC)(rU)(rU)(rU)(rA)(rA)(rG)(rG)
(rG)(rG)(rC)(rA)(rU)(rC)(rG)(rU)#(mU)#(mU)#(mA)
(TR93-1);
(SEP ID NO: 96)
(mC)#(mG)#(mA)#(mA)(mA)(mU)(mG)(mA)(mG)(mA)(mA)
(mC)(rC)(rG)(rU)(rU)(rG)(rC)(rU)(rA)(rC)(rA)
(rA)(rU)(rA)(rA)(rG)(rG)(rC)(rC)(rG)(mU)(mC)(mU)
(mG)(mA)(mA)(mA)(mA)(mG)(rA)(rU)(rG)(rU)(rG)(rC)
(rC)(rG)(rC)(rA)(rA)(rC)(rG)(rC)(rU)(rC)(rU)(rG)
(rC)(rC)(mC)(mC)(mU)(mU)(mA)(mA)(mA)(mG)(mC)(mU)
(mC)(mC)(mU)(mG)(mC)(mU)(mU)(mU)(mA)(mA)(mG)(mG)
(rG)(rG)(rC)(rA)(rU)(mC)(mG)(mU)#(mU)#(mU)#(mA)
(TR93-2),
wherein rN=RNA, mN=2′-O-methyl RNA, fN=2′-fluoro RNA, N #N=phosphorothioate linkage, and N=any nucleotide.

54-58. (canceled)

59. The chemically modified Nme gRNA of claim 53, wherein:
the crRNA portion comprises one or more modified nucleotides each independently selected from a modification of a ribose group, a phosphate group, a nucleobase, or a combination thereof, optionally wherein:
each modification of the ribose group is independently selected from the group consisting of 2′-O-methyl, 2′-fluoro, 2′-deoxy, 2′-O-(2-methoxyethyl) (MOE), 2′-NH₂ (2′-amino), 4′-thio, a bicyclic nucleotide, a locked nucleic acid (LNA), a 2′-(S)-constrained ethyl (S-cEt), a constrained MOE, and a 2′-O,4′-C-aminomethylene bridged nucleic acid (2′,4′-BNA^{NC}), optionally wherein at least 50%, 80%, or 100% of the ribose groups are chemically modified;
each modification of the phosphate group is independently selected from the group consisting of a phosphorothioate, phosphonoacetate (PACE), thiophosphonoacetate (thioPACE), amide, triazole, phosphonate, or phosphotriester modification; and/or
each modification of the nucleobase group is independently selected from the group consisting of 2-thiouridine, 4-thiouridine, N⁶-methyladenosine, pseudouridine, 2,6-diaminopurine, inosine, thymidine, 5-methylcytosine, 5-substituted pyrimidine, isoguanine, isocytosine, and halogenated aromatic groups.

60-65. (canceled)

66. The chemically modified Nme gRNA of anyone of claim 59, wherein crRNA portion comprises at least 50%, 80%, 90%, or 90% modified nucleotides, optionally wherein the crRNA portion modification pattern selected from the group consisting of:

| | |
|---|---|
| CR48-2 | (mN)#(mN)#(mN)#(mN)(mN)(rN)(rN)(rN)(rN)(rN)(rN)(rN)(rN)(rN)(rN)(rN) |
| | (rN)(rN)(rN)(rN)(rN)(rN)(rN)(rN)(rG)(rU)(rU)(rG)(rU)(rA)(rG)(rC) |
| | (rU)(rC)(rC)(rC)(rU)(mU)(mU)(mC)(mU)(mC)(mA)(mU)(mU)#(mU)#(mC)#(mG) |
| | (SEQ ID NO: 13); |
| CR48-154 | (mN)#(mN)#(mN)#(mN)(mN)(mN)(dN)#(mN)(mN)(mN)(mN)(fN)(mN)(fN)(mN)(fN) |
| | (mN)(mN)(rN)(rN)(rN)(mN)(rN)(rN)(mG)(rU)(rU)(rG)(mU)(mA)(mG)(mC)(rU) |
| | (rC)(rC)(rC)(rU)(mU)(mU)(mC)(mU)(mC)(mA)(mU)(mU)#(mU)#(mC)#(mG) |
| | (SEQ ID NO: 14); |
| CR48-155 | (mN)#(mN)#(mN)#(mN)(mN)(mN)(dN)#(mN)(mN)(mN)(mN)(mN)(mN)(fN)(mN)(fN) |
| | (mN)(mN)(rN)(rN)(rN)(mN)(rN)(rN)(mG)(rU)(rU)(rG)(mU)(mA)(mG)(mC)(rU) |
| | (rC)(rC)(rC)(rU)(mU)(mU)(mC)(mU)(mC)(mA)(mU)(mU)#(mU)#(mC)#(mG) |
| | (SEQ ID NO: 15); |
| CR48-190 | (mN)#(mN)#(mN)#(mN)(mN)(mN)(dN)#(mN)(mN)(mN)(mN)(fN)(mN)(fN)(mN)(fN) |
| | (mN)(mN)(rN)(fN)(mN)(mN)(mN)(mN)(mG)(rU)(rU)(rG)(mU)(mA)(mG)(mC)(rU) |
| | (rC)(rC)(rC)(rU)(mU)(mU)(mC)(mU)(mC)(mA)(mU)(mU)#(mU)#(mC)#(mG) |
| | (SEQ ID NO: 16); |
| CR48-191 | (mN)#(mN)#(mN)#(mN)(mN)(mN)(dN)#(mN)(mN)(mN)(mN)(fN)(mN)(fN)(mN)(fN) |
| | (mN)(mN)(rN)(mN)(fN)(mN)(mN)(mN)(mG)(rU)(rU)(rG)(mU)(mA)(mG)(mC)(rU) |
| | (rC)(rC)(rC)(rU)(mU)(mU)(mC)(mU)(mC)(mA)(mU)(mU)#(mU)#(mC)#(mG) |
| | (SEQ ID NO: 17); |
| CR48-192 | (mN)#(mN)#(mN)#(mN)(mN)(mN)(dN)#(mN)(mN)(mN)(mN)(mN)(mN)(fN)(mN)(fN) |
| | (mN)(mN)(rN)(fN)(mN)(mN)(mN)(mN)(mG)(rU)(rU)(rG)(mU)(mA)(mG)(mC)(rU) |
| | (rC)(rC)(rC)(rU)(mU)(mU)(mC)(mU)(mC)(mA)(mU)(mU)#(mU)#(mC)#(mG) |
| | (SEQ ID NO: 18); |
| CR48-193 | (mN)#(mN)#(mN)#(mN)(mN)(mN)(dN)#(mN)(mN)(mN)(mN)(mN)(mN)(fN)(mN)(fN) |
| | (mN)(mN)(rN)(mN)(fN)(mN)(mN)(mN)(mG)(rU)(rU)(rG)(mU)(mA)(mG)(mC)(rU) |
| | (rC)(rC)(rC)(rU)(mU)(mU)(mC)(mU)(mC)(mA)(mU)(mU)#(mU)#(mC)#(mG) |
| | (SEQ ID NO: 19); |
| CR48-194 | (mN)#(mN)#(mN)#(mN)(mN)(mN)(dN)#(mN)(mN)(mN)(mN)(fN)(mN)(fN)(mN)(fN) |
| | (mN)(mN)(rN)#(fN)(mN)(mN)(mN)(mN)(mG)(rU)(rU)(rG)(mU)(mA)(mG)(mC)(rU) |
| | (rC)(rC)(rC)(rU)(mU)(mU)(mC)(mU)(mC)(mA)(mU)(mU)#(mU)#(mC)#(mG) |
| | (SEQ ID NO: 20); |
| CR48-195 | (mN)#(mN)#(mN)#(mN)(mN)(mN)(dN)#(mN)(mN)(mN)(mN)(fN)(mN)(fN)(mN)(fN) |
| | (mN)(mN)(rN)#(mN)(fN)(mN)(mN)(mN)(mG)(rU)(rU)(rG)(mU)(mA)(mG)(mC)(rU) |
| | (rC)(rC)(rC)(rU)(mU)(mU)(mC)(mU)(mC)(mA)(mU)(mU)#(mU)#(mC)#(mG) |
| | (SEQ ID NO: 21); |
| CR48-196 | (mN)#(mN)#(mN)#(mN)(mN)(mN)(dN)#(mN)(mN)(mN)(mN)(mN)(mN)(fN)(mN)(fN) |
| | (mN)(mN)(rN)#(fN)(mN)(mN)(mN)(mN)(mG)(rU)(rU)(rG)(mU)(mA)(mG)(mC)(rU) |
| | (rC)(rC)(rC)(rU)(mU)(mU)(mC)(mU)(mC)(mA)(mU)(mU)#(mU)#(mC)#(mG) |
| | (SEQ ID NO: 22); |
| CR48-197 | (mN)#(mN)#(mN)#(mN)(mN)(mN)(dN)#(mN)(mN)(mN)(mN)(mN)(mN)(fN)(mN)(fN) |
| | (mN)(mN)(rN)#(mN)(fN)(mN)(mN)(mN)(mG)(rU)(rU)(rG)(mU)(mA)(mG)(mC)(rU) |
| | (rC)(rC)(rC)(rU)(mU)(mU)(mC)(mU)(mC)(mA)(mU)(mU)#(mU)#(mC)#(mG) |
| | (SEQ ID NO: 23); |
| CR48-198 | (mN)#(mN)#(mN)#(mN)(mN)(mN)(dN)#(mN)(mN)(mN)(mN)(fN)(mN)(fN)(mN)(fN) |
| | (mN)(mN)(mN)(fN)(mN)(mN)(mN)(mN)(mG)(rU)(rU)(rG)(mU)(mA)(mG)(mC)(rU) |
| | (rC)(rC)(rC)(rU)(mU)(mU)(mC)(mU)(mC)(mA)(mU)(mU)#(mU)#(mC)#(mG) |
| | (SEQ ID NO: 24); |
| CR48-199 | (mN)#(mN)#(mN)#(mN)(mN)(mN)(dN)#(mN)(mN)(mN)(mN)(fN)(mN)(fN)(mN)(fN) |
| | (mN)(mN)(mN)(mN)(fN)(mN)(mN)(mN)(mG)(rU)(rU)(rG)(mU)(mA)(mG)(mC)(rU) |
| | (rC)(rC)(rC)(rU)(mU)(mU)(mC)(mU)(mC)(mA)(mU)(mU)#(mU)#(mC)#(mG) |
| | (SEQ ID NO: 25); |
| CR48-200 | (mN)#(mN)#(mN)#(mN)(mN)(mN)(dN)#(mN)(mN)(mN)(mN)(mN)(mN)(fN)(mN)(fN) |
| | (mN)(mN)(mN)(fN)(mN)(mN)(mN)(mN)(mG)(rU)(rU)(rG)(mU)(mA)(mG)(mC)(rU) |
| | (rC)(rC)(rC)(rU)(mU)(mU)(mC)(mU)(mC)(mA)(mU)(mU)#(mU)#(mC)#(mG) |
| | (SEQ ID NO: 26); |
| CR48-201 | (mN)#(mN)#(mN)#(mN)(mN)(mN)(dN)#(mN)(mN)(mN)(mN)(mN)(mN)(fN)(mN)(fN) |
| | (mN)(mN)(mN)(mN)(fN)(mN)(mN)(mN)(mG)(rU)(rU)(rG)(mU)(mA)(mG)(mC)(rU) |
| | (rC)(rC)(rC)(rU)(mU)(mU)(mC)(mU)(mC)(mA)(mU)(mU)#(mU)#(mC)#(mG) |
| | (SEQ ID NO: 27); |
| CR48-202 | (mN)#(mN)#(mN)#(mN)(mN)(mN)(dN)#(mN)(mN)(mN)(mN)(fN)(mN)(fN)(mN)(fN) |
| | (mN)(mN)(fN)(fN)(mN)(mN)(mN)(mN)(mG)(rU)(rU)(rG)(mU)(mA)(mG)(mC)(rU) |
| | (rC)(rC)(rC)(rU)(mU)(mU)(mC)(mU)(mC)(mA)(mU)(mU)#(mU)#(mC)#(mG) |
| | (SEQ ID NO: 28); |
| CR48-203 | (mN)#(mN)#(mN)#(mN)(mN)(mN)(dN)#(mN)(mN)(mN)(mN)(fN)(mN)(fN)(mN)(fN) |
| | (mN)(mN)(fN)(mN)(fN)(mN)(mN)(mN)(mG)(rU)(rU)(rG)(mU)(mA)(mG)(mC)(rU) |
| | (rC)(rC)(rC)(rU)(mU)(mU)(mC)(mU)(mC)(mA)(mU)(mU)#(mU)#(mC)#(mG) |
| | (SEQ ID NO: 29); |
| CR48-204 | (mN)#(mN)#(mN)#(mN)(mN)(mN)(dN)#(mN)(mN)(mN)(mN)(mN)(mN)(fN)(mN)(fN) |
| | (mN)(mN)(fN)(fN)(mN)(mN)(mN)(mN)(mG)(rU)(rU)(rG)(mU)(mA)(mG)(mC)(rU) |
| | (rC)(rC)(rC)(rU)(mU)(mU)(mC)(mU)(mC)(mA)(mU)(mU)#(mU)#(mC)#(mG) |
| | (SEQ ID NO: 30); |
| CR48-205 | (mN)#(mN)#(mN)#(mN)(mN)(mN)(dN)#(mN)(mN)(mN)(mN)(mN)(mN)(fN)(mN)(fN) |
| | (mN)(mN)(fN)(mN)(fN)(mN)(mN)(mN)(mG)(rU)(rU)(rG)(mU)(mA)(mG)(mC)(rU) |
| | (rC)(rC)(rC)(rU)(mU)(mU)(mC)(mU)(mC)(mA)(mU)(mU)#(mU)#(mC)#(mG) |
| | (SEQ ID NO: 31); |
| CR48-213 | (mN)#(mN)#(mN)#(mN)(mN)(mN)(dN)#(mN)(mN)(mN)(mN)(mN)(mN)(fN)(mN)(fN) |
| | (mN)(mN)(rN)(rN)(rN)(mN)(rN)(rN)(mG)(dT)#(rU)(mG)(mU)(mA)(mG)(mC)(rU) |
| | (rC)(rC)(rC)(rU)(mU)(mU)(mC)(mU)(mC)(mA)(mU)(mU)#(mU)#(mC)#(mG) |
| | (SEQ ID NO: 32); |
| CR48-214 | (mN)#(mN)#(mN)#(mN)(mN)(mN)(dN)#(mN)(mN)(mN)(mN)(mN)(mN)(fN)(mN)(fN) |
| | (mN)(mN)(rN)(rN)(rN)(mN)(rN)(rN)(mG)(dT)#(rU)(mG)(mU)(mA)(mG)(mC)(rU) |
| | (rC)(mC)(rC)(rU)(mU)(mU)(mC)(mU)(mC)(mA)(mU)(mU)#(mU)#(mC)#(mG) |
| | (SEQ ID NO: 33); |
| CR48-215 | (mN)#(mN)#(mN)#(mN)(mN)(mN)(dN)#(mN)(mN)(mN)(mN)(mN)(mN)(fN)(mN)(fN) |
| | (mN)(mN)(rN)(rN)(rN)(mN)(rN)(rN)(mG)(dT)#(rU)(mG)(mU)(mA)(mG)(mC)(rU) |
| | (rC)(rC)(mC)(rU)(mU)(mU)(mC)(mU)(mC)(mA)(mU)(mU)#(mU)#(mC)#(mG) |
| | (SEQ ID NO: 34); |
| CR48-216 | (mN)#(mN)#(mN)#(mN)(mN)(mN)(dN)#(mN)(mN)(mN)(mN)(mN)(mN)(fN)(mN)(fN) |
| | (mN)(mN)(rN)(rN)(rN)(mN)(rN)(rN)(mG)(dT)#(rU)(mG)(mU)(mA)(mG)(mC)(rU) |
| | (rC)(mC)(mC)(rU)(mU)(mU)(mC)(mU)(mC)(mA)(mU)(mU)#(mU)#(mC)#(mG) |
| | (SEQ ID NO: 35); |
| CR48-217 | (mN)#(mN)#(mN)#(mN)(mN)(mN)(dN)#(mN)(mN)(mN)(mN)(mN)(mN)(fN)(mN)(fN) |
| | (mN)(mN)(rN)(rN)(rN)(mN)(rN)(rN)(mG)(rU)(rU)(rG)(mU)(mA)(mG)(mC)(dT) |
| | #(rC)(rC)(rC)(rU)(mU)(mU)(mC)(mU)(mC)(mA)(mU)(mU)#(mU)#(mC)#(mG) |
| | (SEQ ID NO: 36); |
| CR48-218 | (mN)#(mN)#(mN)#(mN)(mN)(mN)(dN)#(mN)(mN)(mN)(mN)(mN)(mN)(fN)(mN)(fN) |
| | (mN)(mN)(rN)(rN)(rN)(mN)(rN)(rN)(mG)(rU)(rU)(rG)(mU)(mA)(mG)(mC)(rU) |
| | (dC)#(rC)(rC)(rU)(mU)(mU)(mC)(mU)(mC)(mA)(mU)(mU)#(mU)#(mC)#(mG) |
| | (SEQ ID NO: 37); |
| CR48-219 | (mN)#(mN)#(mN)#(mN)(mN)(mN)(dN)#(mN)(mN)(mN)(mN)(mN)(mN)(fN)(mN)(fN) |
| | (mN)(mN)(rN)(rN)(rN)(mN)(rN)(rN)(mG)(rU)(rU)(rG)(mU)(mA)(mG)(mC)(rU) |
| | (rC)(dC)#(rC)(rU)(mU)(mU)(mC)(mU)(mC)(mA)(mU)(mU)#(mU)#(mC)#(mG) |
| | (SEQ ID NO: 38); |
| CR48-220 | (mN)#(mN)#(mN)#(mN)(mN)(mN)(dN)#(mN)(mN)(mN)(mN)(mN)(mN)(fN)(mN)(fN) |
| | (mN)(mN)(rN)(rN)(rN)(mN)(rN)(rN)(mG)(rU)(rU)(rG)(mU)(mA)(mG)(mC)(rU) |
| | (rC)(rC)(dC)#(rU)(mU)(mU)(mC)(mU)(mC)(mA)(mU)(mU)#(mU)#(mC)#(mG) |
| | (SEQ ID NO: 39); |
| CR48-221 | (mN)#(mN)#(mN)#(mN)(mN)(mN)(dN)#(mN)(mN)(mN)(mN)(mN)(mN)(fN)(mN)(fN) |
| | (mN)(mN)(rN)(rN)(rN)(mN)(rN)(rN)(mG)(rU)(rU)(rG)(mU)(mA)(mG)(mC)(rU) |
| | (rC)(rC)(rC)(dT)#(mU)(mU)(mC)(mU)(mC)(mA)(mU)(mU)#(mU)#(mC)#(mG) |
| | (SEQ ID NO: 40); |
| CR48-222 | (mN)#(mN)#(mN)#(mN)(mN)(mN)(dN)#(mN)(mN)(mN)(mN)(mN)(mN)(fN)(mN)(fN) |
| | (mN)(mN)(rN)(rN)(rN)(mN)(rN)(rN)(mG)(rU)(rU)(rG)(mU)(mA)(mG)(mC)(dT) |
| | #(rC)(dC)#(rC)(dT)#(mU)(mU)(mC)(mU)(mC)(mA)(mU)(mU)#(mU)#(mC)#(mG) |
| | (SEQ ID NO: 41); |
| CR48-223 | (mN)#(mN)#(mN)#(mN)(mN)(mN)(dN)#(mN)(mN)(mN)(mN)(mN)(mN)(fN)(mN)(fN) |
| | (mN)(mN)(rN)(rN)(rN)(mN)(rN)(rN)(mG)(dT)#(rU)(rG)(mU)(mA)(mG)(mC)(dT) |
| | #(dC)#(dC)#(rC)(dT)#(mU)(mU)(mC)(mU)(mC)(mA)(mU)(mU)#(mU)#(mC)#(mG) |
| | (SEQ ID NO: 42); |
| CR48-224 | (mN)#(mN)#(mN)#(mN)(mN)(mN)(dN)#(mN)(mN)(mN)(mN)(mN)(mN)(fN)(mN)(fN) |
| | (mN)(mN)(rN)(rN)(rN)(mN)(rN)(rN)(mG)(dT)#(rU)(mG)(mU)(mA)(mG)(mC)(dT) |
| | #(rC)(mC)(rC)(dT)#(mU)(mU)(mC)(mU)(mC)(mA)(mU)(mU)#(mU)#(mC)#(mG) |
| | (SEQ ID NO: 43); |
| CR48-225 | (mN)#(mN)#(mN)#(mN)(mN)(mN)(dN)#(mN)(mN)(mN)(mN)(mN)(mN)(fN)(mN)(fN) |
| | (mN)(mN)(rN)(rN)(rN)(mN)(rN)(rN)(mG)(dT)#(rU)(mG)(mU)(mA)(mG)(mC)(dT) |
| | #(rC)(dC)#(mC)(dT)#(mU)(mU)(mC)(mU)(mC)(mA)(mU)(mU)#(mU)#(mC)#(mG) |
| | (SEQ ID NO: 44); |
| CR48-226 | (mN)#(mN)#(mN)#(mN)(mN)(mN)(dN)#(mN)(mN)(mN)(mN)(mN)(mN)(fN)(mN)(fN) |
| | (mN)(mN)(rN)(rN)(rN)(mN)(rN)(rN)(mG)(dT)#(rU)(mG)(mU)(mA)(mG)(mC)(dT) |
| | #(rC)(mC)(mC)(dT)#(mU)(mU)(mC)(mU)(mC)(mA)(mU)(mU)#(mU)#(mC)#(mG) |
| | (SEQ ID NO: 45); |
| CR48-227 | (mN)#(mN)#(mN)#(mN)(mN)(mN)(dN)#(mN)(mN)(mN)(mN)(mN)(mN)(fN)(mN)(fN) |
| | (mN)(mN)(rN)(rN)(rN)(mN)(rN)(rN)(mG)(dT)#(rU)(mG)(mU)(mA)(mG)(mC)(dT) |
| | #(dC)#(mC)(mC)(dT)#(mU)(mU)(mC)(mU)(mC)(mA)(mU)(mU)#(mU)#(mC)#(mG) |
| | (SEQ ID NO: 46); |
| CR48-199- | (mN)#(mN)#(mN)#(mN)(mN)(mN)(dN)#(mN)(mN)(mN)(mN)(fN)(mN)(fN)(mN)(fN) |
| V1.1 | (mN)(mN)(mN)(mN)(fN)(mN)(mN)(mN)(mG)(rU)(rU)(mG)(mU)(mA)(mG)(mC)(rU) |
| | (rC)(rC)(dC)#(rU)(mU)(mU)(mC)(mU)(mC)(mA)(mU)(mU)#(mU)#(mC)#(mG) |
| | (SEQ ID NO: 47); |
| CR48-199- | (mN)#(mN)#(mN)#(mN)(mN)(mN)(dN)#(mN)(mN)(mN)(mN)(fN)(mN)(fN)(mN)(fN) |
| V1.2 | (mN)(mN)(mN)(mN)(fN)(mN)(mN)(mN)(mG)(rU)(rU)(mG)(mU)(mA)(mG)(mC)(rU) |
| | (rC)(dC)#(rC)(rU)(mU)(mU)(mC)(mU)(mC)(mA)(mU)(mU)#(mU)#(mC)#(mG) |
| | (SEQ ID NO: 48); |
| CR48-199- | (mN)#(mN)#(mN)#(mN)(mN)(mN)(dN)#(mN)(mN)(mN)(mN)(fN)(mN)(fN)(mN)(fN) |
| V1.3 | (mN)(mN)(mN)(mN)(fN)(mN)(mN)(mN)(mG)(rU)(rU)(mG)(mU)(mA)(mG)(mC)(rU) |
| | (rC)(rC)(rC)(dT)#(mU)(mU)(mC)(mU)(mC)(mA)(mU)(mU)#(mU)#(mC)#(mG) |
| | (SEQ ID NO: 49); |
| CR48-199- | (mN)#(mN)#(mN)#(mN)(mN)(mN)(dN)#(mN)(mN)(mN)(mN)(fN)(mN)(fN)(mN)(fN) |
| V1.4 | (mN)(mN)(mN)(mN)(fN)(mN)(mN)(mN)(mG)(rU)(rU)(mG)(mU)(mA)(mG)(mC)(rU) |
| | (rC)(mC)(rC)(rU)(mU)(mU)(mC)(mU)(mC)(mA)(mU)(mU)#(mU)#(mC)#(mG) |
| | (SEQ ID NO: 50); |
| CR48-199- | (mN)#(mN)#(mN)#(mN)(mN)(mN)(dN)#(mN)(mN)(mN)(mN)(fN)(mN)(fN)(mN)(fN) |
| V1.5 | (mN)(mN)(mN)(mN)(fN)(mN)(mN)(mN)(mG)(rU)(rU)(mG)(mU)(mA)(mG)(mC)(rU) |
| | (rC)(dC)#(dC)#(rU)(mU)(mU)(mC)(mU)(mC)(mA)(mU)(mU)#(mU)#(mC)#(mG) |
| | (SEQ ID NO: 51); |
| CR48-199- | (mN)#(mN)#(mN)#(mN)(mN)(mN)(dN)#(mN)(mN)(mN)(mN)(fN)(mN)(fN)(mN)(fN) |
| V1.6 | (mN)(mN)(mN)(mN)(fN)(mN)(mN)(mN)(mG)(rU)(rU)(mG)(mU)(mA)(mG)(mC)(rU) |
| | (rC)(dC)#(rC)(dT)#(mU)(mU)(mC)(mU)(mC)(mA)(mU)(mU)#(mU)#(mC)#(mG) |
| | (SEQ ID NO: 52); |
| CR48-199- | (mN)#(mN)#(mN)#(mN)(mN)(mN)dN)#(mN)(mN)(mN)(mN)(fN)(mN)(fN)(mN)(fN) |
| V1.7 | (mN)mN)(mN)(mN)(fN)(mN)(mN)(mN)(mG)(rU)(rU)(mG)(mU)(mA)(mG)(mC)(rU) |
| | (rC)(dC)#(dC)#(dT)#(mU)(mU)(mC)(mU)(mC)(mA)(mU)(mU)#(mU)#(mC)#(mG) |
| | (SEQ ID NO: 53); |
| CR48-199- | (mN)#(mN)#(mN)#(mN)(mN)(mN)(dN)#(mN)(mN)(mN)(mN)(fN)(mN)(fN)(mN)(fN) |
| V1.8 | (mN)(mN)(mN)(mN)(fN)(mN)(mN)(mN)(mG)(rU)(rU)(mG)(mU)(mA)(mG)(mC)(rU) |
| | (rC)(mC)(dC)#(rU)(mU)(mU)(mC)(mU)(mC)(mA)(mU)(mU)#(mU)#(mC)#(mG) |
| | (SEQ ID NO: 54); |
| CR48-199- | (mN)#(mN)#(mN)#(mN)(mN)(mN)(dN)#(mN)(mN)(mN)(mN)(fN)(mN)(fN)(mN)(fN) |
| V1.9 | (mN)(mN)(mN)(mN)(fN)(mN)(mN)(mN)(mG)(rU)(rU)(mG)(mU)(mA)(mG)(mC)(rU) |
| | (rC)(mC)(rC)(dT)#(mU)(mU)(mC)(mU)(mC)(mA)(mU)(mU)#(mU)#(mC)#(mG) |
| | (SEQ ID NO: 55); |
| CR48-199- | (mN)#(mN)#(mN)#(mN)(mN)(mN)(dN)#(mN)(mN)(mN)(mN)(fN)(mN)(fN)(mN)(fN) |
| V1.10 | (mN)(mN)(mN)(mN)(fN)(mN)(mN)(mN)(mG)(rU)(rU)(mG)(mU)(mA)(mG)(mC)(rU) |
| | (rC)(mC)(dC)#(dT)#(mU)(mU)(mC)(mU)(mC)(mA)(mU)(mU)#(mU)#(mC)#(mG) |
| | (SEQ ID NO: 56); |
| CR48-199- | (mN)#(mN)#(mN)#(mN)(mN)(mN)(dN)#(mN)(mN)(mN)(mN)(fN)(mN)(fN)(mN)(fN) |
| V1.11 | (mN)(mN)(mN)(mN)(fN)(mN)(mN)(mN)(mG)(rU)(rU)(mG)(mU)(mA)(mG)(mC)(rU) |
| | (rC)(mC)(mC)(rU)(mU)(mU)(mC)(mU)(mC)(mA)(mU)(mU)#(mU)#(mC)#(mG) |
| | (SEQ ID NO: 57); |
| CR48-199- | (mN)#(mN)#(mN)#(mN)(mN)(mN)(dN)#(mN)(mN)(mN)(mN)(fN)(mN)(fN)(mN)(fN) |
| V1.12 | (mN)(mN)(mN)(mN)(fN)(mN)(mN)(mN)(mG)(rU)(rU)(mG)(mU)(mA)(mG)(mC)(rU) |
| | (rC)(mC)(mC)(dT)#(mU)(mU)(mC)(mU)(mC)(mA)(mU)(mU)#(mU)#(mC)#(mG) |
| | (SEQ ID NO: 58); |
| CR48-199- | (mN)#(mN)#(mN)#(mN)(mN)(mN)(dN)#(mN)(mN)(mN)(mN)(fN)(mN)(fN)(mN)(fN) |
| V1.13 | (mN)(mN)(mN)(mN)(fN)(mN)(mN)(mN)(mG)(rU)(rU)(mG)(mU)(mA)(mG)(mC)(dT) |
| | #(rC)(rC)(dC)#(rU)(mU)(mU)(mC)(mU)(mC)(mA)(mU)(mU)#(mU)#(mC)#(mG) |
| | (SEQ ID NO: 59); |
| CR48-199- | (mN)#(mN)#(mN)#(mN)(mN)(mN)(dN)#(mN)(mN)(mN)(mN)(fN)(mN)(fN)(mN)(fN) |
| V1.14 | (mN)(mN)(mN)(mN)(fN)(mN)(mN)(mN)(mG)(rU)(rU)(mG)(mU)(mA)(mG)(mC)(dT) |
| | #(rC)(dC)#(rC)(rU)(mU)(mU)(mC)(mU)(mC)(mA)(mU)(mU)#(mU)#(mC)#(mG) |
| | (SEQ ID NO: 60); |
| CR48-199- | (mN)#(mN)#(mN)#(mN)(mN)(mN)(dN)#(mN)(mN)(mN)(mN)(fN)(mN)(fN)(mN)(fN) |
| V1.15 | (mN)(mN)(mN)(mN)(fN)(mN)(mN)(mN)(mG)(rU)(rU)(mG)(mU)(mA)(mG)(mC)(dT) |
| | #(rC)(rC)(rC)(dT)#(mU)(mU)(mC)(mU)(mC)(mA)(mU)(mU)#(mU)#(mC)#(mG) |
| | (SEQ ID NO: 61); |
| CR48-199- | (mN)#(mN)#(mN)#(mN)(mN)(mN)(dN)#(mN)(mN)(mN)(mN)(fN)(mN)(fN)(mN)(fN) |
| V1.16 | (mN)(mN)(mN)(mN)(fN)(mN)(mN)(mN)(mG)(rU)(rU)(mG)(mU)(mA)(mG)(mC)(dT) |
| | #(rC)(mC)(rC)(rU)(mU)(mU)(mC)(mU)(mC)(mA)(mU)(mU)#(mU)#(mC)#(mG) |
| | (SEQ ID NO: 62); |
| CR48-199- | (mN)#(mN)#(mN)#(mN)(mN)(mN)(dN)#(mN)(mN)(mN)(mN)(fN)(mN)(fN)(mN)(fN) |
| V1.17 | (mN)(mN)(mN)(mN)(fN)(mN)(mN)(mN)(mG)(rU)(rU)(mG)(mU)(mA)(mG)(mC)(dT) |
| | #(rC)(dC)#(dC)#(rU)(mU)(mU)(mC)(mU)(mC)(mA)(mU)(mU)#(mU)#(mC)#(mG) |
| | (SEQ ID NO: 63); |
| CR48-199- | (mN)#(mN)#(mN)#(mN)(mN)(mN)(dN)#(mN)(mN)(mN)(mN)(fN)(mN)(fN)(mN)(fN) |
| V1.18 | (mN)(mN)(mN)(mN)(fN)(mN)(mN)(mN)(mG)(rU)(rU)(mG)(mU)(mA)(mG)(mC)(dT) |
| | #(rC)(dC)#(rC)(dT)#(mU)(mU)(mC)(mU)(mC)(mA)(mU)(mU)#(mU)#(mC)#(mG) |
| | (SEQ ID NO: 64); |
| CR48-199- | (mN)#(mN)#(mN)#(mN)(mN)(mN)(dN)#(mN)(mN)(mN)(mN)(fN)(mN)(fN)(mN)(fN) |
| V1.19 | (mN)(mN)(mN)(mN)(fN)(mN)(mN)(mN)(mG)(rU)(rU)(mG)(mU)(mA)(mG)(mC)(dT) |
| | #(rC)(dC)#(dC)#(dT)#(mU)(mU)(mC)(mU)(mC)(mA)(mU)(mU)#(mU)#(mC)#(mG) |
| | (SEQ ID NO: 65); |
| CR48-199- | (mN)#(mN)#(mN)#(mN)(mN)(mN)(dN)#(mN)(mN)(mN)(mN)(fN)(mN)(fN)(mN)(fN) |
| V1.20 | (mN)(mN)(mN)(mN)(fN)(mN)(mN)(mN)(mG)(rU)(rU)(mG)(mU)(mA)(mG)(mC)(dT) |
| | #(rC)(mC)(dC)#(rU)(mU)(mU)(mC)(mU)(mC)(mA)(mU)(mU)#(mU)#(mC)#(mG) |
| | (SEQ ID NO: 66); |
| CR48-199- | (mN)#(mN)#(mN)#(mN)(mN)(mN)(dN)#(mN)(mN)(mN)(mN)(fN)(mN)(fN)(mN)(fN) |
| V1.21 | (mN)(mN)(mN)(mN)(fN)(mN)(mN)(mN)(mG)(rU)(rU)(mG)(mU)(mA)(mG)(mC)(dT) |
| | #(rC)(mC)(rC)(dT)#(mU)(mU)(mC)(mU)(mC)(mA)(mU)(mU)#(mU)#(mC)#(mG) |
| | (SEQ ID NO: 67); |
| CR48-199- | (mN)#(mN)#(mN)#(mN)(mN)(mN)(dN)#(mN)(mN)(mN)(mN)(fN)(mN)(fN)(mN)(fN) |
| V1.22 | (mN)(mN)(mN)(mN)(fN)(mN)(mN)(mN)(mG)(rU)(rU)(mG)(mU)(mA)(mG)(mC)(dT) |
| | #(rC)(mC)(dC)#(dT)#(mU)(mU)(mC)(mU)(mC)(mA)(mU)(mU)#(mU)#(mC)#(mG) |
| | (SEQ ID NO: 68); |
| CR48-199- | (mN)#(mN)#(mN)#(mN)(mN)(mN)(dN)#(mN)(mN)(mN)(mN)(fN)(mN)(fN)(mN)(fN) |
| V1.23 | (mN)(mN)(mN)(mN)(IN)(mN)(mN)(mN)(mG)(rU)(rU)(mG)(mU)(mA)(mG)(mC)(dT) |
| | #(rC)(mC)(mC)(rU)(mU)(mU)(mC)(mU)(mC)(mA)(mU)(mU)#(mU)#(mC)#(mG) |
| | (SEQ ID NO: 69); |
| CR48-199- | (mN)#(mN)#(mN)#(mN)(mN)(mN)(dN)#(mN)(mN)(mN)(mN)(fN)(mN)(fN)(mN)(fN) |
| V1.24 | (mN)(mN)(mN)(mN)(fN)(mN)(mN)(mN)(mG)(rU)(rU)(mG)(mU)(mA)(mG)(mC)(dT) |
| | #(rC)(mC)(mC)(dT)#(mU)(mU)(mC)(mU)(mC)(mA)(mU)(mU)#(mU)#(mC)#(mG) |
| | (SEQ ID NO: 70); |
| CR48-199- | (mN)#(mN)#(mN)#(mN)(mN)(mN)(dN)#(mN)(mN)(mN)(mN)(fN)(mN)(fN)(mN)(fN) |
| V1.25 | (mN)(mN)(mN)(mN)(fN)(mN)(mN)(mN)(mG)(dT)#(rU)(mG)(mU)(mA)(mG)(mC)(dT) |
| | #(rC)(rC)(dC)#(rU)(mU)(mU)(mC)(mU)(mC)(mA)(mU)(mU)#(mU)#(mC)#(mG) |
| | (SEQ ID NO: 71); |
| CR48-199- | (mN)#(mN)#(mN)#(mN)(mN)(mN)(dN)#(mN)(mN)(mN)(mN)(fN)(mN)(fN)(mN)(fN) |
| V1.26 | (mN)(mN)(mN)(mN)(fN)(mN)(mN)(mN)(mG)(dT)#(rU)(mG)(mU)(mA)(mG)(mC)(dT) |
| | #(rC)(dC)#(rC)(rU)(mU)(mU)(mC)(mU)(mC)(mA)(mU)(mU)#(mU)#(mC)#(mG) |
| | (SEQ ID NO: 72); |
| CR48-199- | (mN)#(mN)#(mN)#(mN)(mN)(mN)(dN)#(mN)(mN)(mN)(mN)(fN)(mN)(fN)(mN)(fN) |
| V1.27 | (mN)(mN)(mN)(mN)(fN)(mN)(mN)(mN)(mG)(dT)#(rU)(mG)(mU)(mA)(mG)(mC)(dT) |
| | #(rC)(rC)(r)(dT)#(mU)(mU)(mC)(mU)(mC)(mA)(mU)(mU)#(mU)#(mC)#(mG) |
| | (SEQ ID NO: 73); |
| CR48-199- | (mN)#(mN)#(mN)#(mN)(mN)(mN)(dN)#(mN)(mN)(mN)(mN)(fN)(mN)(fN)(mN)(fN) |
| V1.28 | (mN)(mN)(mN)(mN)(fN)(mN)(mN)(mN)(mG)(dT)#(rU)(mG)(mU)(mA)(mG)(mC)(dT) |
| | #(rC)(mC)(rC)(rU)(mU)(mU)(mC)(mU)(mC)(mA)(mU)(mU)#(mU)#(mC)#(mG) |
| | (SEQ ID NO: 74); |
| CR48-199- | (mN)#(mN)#(mN)#(mN)(mN)(mN)(dN)#(mN)(mN)(mN)(mN)(fN)(mN)(fN)(mN)(fN) |
| V1.29 | mN(mN)()(mN)(mN)(fN)(mN)(mN)(mN)(mG)(dT)#(rU)(mG)(mU)(mA)(mG)(mC)(dT) |
| | dC#(rC)(dC)#()#(rU)(mU)(mU)(mC)(mU)(mC)(mA)(mU)(mU)#(mU)#(mC)#(mG) |
| | (SEQ ID NO: 75); |
| CR48-199- | (mN)#(mN)#(mN)#(mN)(mN)(mN)(dN)#(mN)(mN)(mN)(mN)(fN)(mN)(fN)(mN)(fN) |
| V1.30 | (mN)(mN)(mN)(mN)(fN)(mN)(mN)(mN)(mG)(dT)#(rU)(mG)(mU)(mA)(mG)(mC)(dT) |
| | #(rC)(dC)#(rC)(dT)#(mU)(mU)(mC)(mU)(mC)(mA)(mU)(mU)#(mU)#(mC)#(mG) |
| | (SEQ ID NO: 76); |
| CR48-199- | (mN)#(mN)#(mN)#(mN)(mN)(mN)(dN)#(mN)(mN)(mN)(mN)(fN)(mN)(fN)(mN)(fN) |
| V1.31 | (mN)(mN)(mN)(mN)(fN)(mN)(mN)(mN)(mG)(dT)#(rU)(mG)(mU)(mA)(mG)(mC)(dT) |
| | #(rC)(dC)#(dC)#(dT)#(mU)(mU)(mC)(mU)(mC)(mA)(mU)(mU)#(mU)#(mC)#(mG) |
| | (SEQ ID NO: 77); |
| CR48-199- | (mN)#(mN)#(mN)#(mN)(mN)(mN)(dN)#(mN)(mN)(mN)(mN)(fN)(mN)(fN)(mN)(fN) |
| V1.32 | (mN)(mN)(mN)(mN)(fN)(mN)(mN)(mN)(mG)(dT)#(rU)(mG)(mU)(mA)(mG)(mC)(dT) |
| | #(rC)(mC)(dC)#(rU)(mU)(mU)(mC)(mU)(mC)(mA)(mU)(mU)#(mU)#(mC)#(mG) |
| | (SEQ ID NO: 78); |
| CR48-199- | (mN)#(mN)#(mN)#(mN)(mN)(mN)(dN)#(mN)(mN)(mN)(mN)(fN)(mN)(fN)(mN)(fN) |
| V1.33 | (mN)(mN)(mN)(mN)(fN)(mN)(mN)(mN)(mG)(dT)#(rU)(mG)(mU)(mA)(mG)(mC)(dT) |
| | #(rC)(mC)(rC)(dT)#(mU)(mU)(mC)(mU)(mC)(mA)(mU)(mU)#(mU)#(mC)#(mG) |
| | (SEQ ID NO: 79); |
| CR48-199- | (mN)#(mN)#(mN)#(mN)(mN)(mN)(dN)#(mN)(mN)(mN)(mN)(fN)(mN)(fN)(mN)(fN) |
| V1.34 | (mN)(mN)(mN)(mN)(fN)(mN)(mN)(mN)(mG)(dT)#(rU)(mG)(mU)(mA)(mG)(mC)(dT) |
| | #(rC)(mC)(dC)#(dT)#(mU)(mU)(mC)(mU)(mC)(mA)(mU)(mU)#(mU)#(mC)#(mG) |
| | (SEQ ID NO: 80); |
| CR48-199- | (mN)#(mN)#(mN)#(mN)(mN)(mN)(dN)#(mN)(mN)(mN)(mN)(fN)(mN)(fN)(mN)(fN) |
| V1.35 | (mN)(mN)(mN)(mN)(fN)(mN)(mN)(mN)(mG)(dT)#(rU)(mG)(mU)(mA)(mG)(mC)(dT) |
| | #(rC)(mC)(mC)(rU)(mU)(mU)(mC)(mU)(mC)(mA)(mU)(mU)#(mU)#(mC)#(mG) |
| | (SEQ ID NO: 81); |
| CR48-199- | (mN)#(mN)#(mN)#(mN)(mN)(mN)(dN)#(mN)(mN)(mN)(mN)(fN)(mN)(fN)(mN)(fN) |
| V1.36 | (mN)(mN)(mN)(mN)(fN)(mN)(mN)(mN)(mG)(dT)#(rU)(mG)(mU)(mA)(mG)(mC)(dT) |
| | #(rC)(mC)(mC)(dT)#(mU)(mU)(mC)(mU)(mC)(mA)(mU)(mU)#(mU)#(mC)#(mG) |
| | (SEQ ID NO: 82); |
| CR48-203- | (mN)#(mN)#(mN)#(mN)(mN)(mN)(dN)#(mN)(mN)(mN)(mN)(fN)(mN)(fN)(mN)(fN) |
| V1.7 | (mN)(mN)(fN)(mN)(fN)(mN)(mN)(mN)(mG)(rU)(rU)(mG)(mU)(mA)(mG)(mC)(rU) |
| | (rC)(dC)#(dC)#(dT)#(mU)(mU)(mC)(mU)(mC)(mA)(mU)(mU)#(mU)#(mC)#(mG) |
| | (SEQ ID NO: 83); |
| CR48-203- | (mN)#(mN)#(mN)#(mN)(mN)(mN)(dN)#(mN)(mN)(mN)(mN)(fN)(mN)(fN)(mN)(fN) |
| V1.10 | (mN)(mN)(fN)(mN)(fN)(mN)(mN)(mN)(mG)(rU)(rU)(mG)(mU)(mA)(mG)(mC)(rU) |
| | (rC)(mC)(dC)#(dT)#(mU)(mU)(mC)(mU)(mC)(mA)(mU)(mU)#(mU)#(mC)#(mG) |
| | (SEQ ID NO: 84); |
| CR48-203- | (mN)#(mN)#(mN)#(mN)(mN)(mN)(dN)#(mN)(mN)(mN)(mN)(fN)(mN)(fN)(mN)(fN) |
| V1.12 | (mN)(mN)(fN)(mN)(fN)(mN)(mN)(mN)(mG)(rU)(rU)(mG)(mU)(mA)(mG)(mC)(rU) |
| | (rC)(mC)(mC)(dT)#(mU)(mU)(mC)(mU)(mC)(mA)(mU)(mU)#(mU)#(mC)#(mG) |
| | (SEQ ID NO: 85); |
| CR48-203- | (mN)#(mN)#(mN)#(mN)(mN)(mN)(dN)#(mN)(mN)(mN)(mN)(fN)(mN)(fN)(mN)(fN) |
| V1.18 | (mN)(mN)(fN)(mN)(fN)(mN)(mN)(mN)(mG)(rU)(rU)(mG)(mU)(mA)(mG)(mC)(dT) |
| | #(rC)(dC)#(rC)(dT)#(mU)(mU)(mC)(mU)(mC)(mA)(mU)(mU)#(mU)#(mC)#(mG) |
| | (SEQ ID NO: 86); |
| CR48-203- | (mN)#(mN)#(mN)#(mN)(mN)(mN)(dN)#(mN)(mN)(mN)(mN)(fN)(mN)(fN)(mN)(fN) |
| V1.19 | m(mN)(N)(fN)(mN)(fN)(mN)(mN)(mN)(mG)(rU)(rU)(mG)(mU)(mA)(mG)(mC)(dT) |
| | #(rC)(dC)#(dC)#(dT)#(mU)(mU)(mC)(mU)(mC)(mA)(mU)(mU)#(mU)#(mC)#(mG) |
| | (SEQ ID NO: 87); |
| CR48-203- | (mN)#(mN)#(mN)#(mN)(mN)(mN)(dN)#(mN)(mN)(mN)(mN)(fN)(mN)(fN)(mN)(fN) |
| V1.22 | (mN)(mN)(fN)(mN)(fN)(mN)(mN)(mN)(mG)(rU)(rU)(mG)(mU)(mA)(mG)(mC)(dT) |
| | #(rC)(mC)(dC)#(dT)#(mU)(mU)(mC)(mU)(mC)(mA)(mU)(mU)#(mU)#(mC)#(mG) |
| | (SEQ ID NO: 88); |
| CR48-203- | (mN)#(mN)#(mN)#(mN)(mN)(mN)(dN)#(mN)(mN)(mN)(mN)(fN)(mN)(fN)(mN)(fN) |
| V1.24 | (mN)(mN)(fN)(mN)(fN)(mN)(mN)(mN)(mG)(rU)(rU)(mG)(mU)(mA)(mG)(mC)(dT) |
| | #(rC)(mC)(mC)(dT)#(mU)(mU)(mC)(mU)(mC)(mA)(mU)(mU)#(mU)#(mC)#(mG) |
| | (SEQ ID NO: 89); |
| CR48-203- | (mN)#(mN)#(mN)#(mN)(mN)(mN)(dN)#(mN)(mN)(mN)(mN)(fN)(mN)(fN)(mN)(fN) |
| V1.30 | (mN)(mN)(fN)(mN)(fN)(mN)(mN)(mN)(mG)(dT)#(rU)(mG)(mU)(mA)(mG)(mC)(dT) |
| | #(rC)(dC)#(rC)(dT)#(mU)(mU)(mC)(mU)(mC)(mA)(mU)(mU)#(mU)#(mC)#(mG) |
| | (SEQ ID NO: 90); |
| CR48-203- | (mN)#(mN)#(mN)#(mN)(mN)(mN)(dN)#(mN)(mN)(mN)(mN)(fN)(mN)(fN)(mN)(fN) |
| V1.31 | (mN)(mN)(fN)(mN)(fN)(mN)(mN)(mN)(mG)(dT)#(rU)(mG)(mU)(mA)(mG)(mC)(dT) |
| | #(rC)(dC)#(dC)#(dT)#(mU)(mU)(mC)(mU)(mC)(mA)(mU)(mU)#(mU)#(mC)#(mG) |
| | (SEQ ID NO: 91); |
| CR48-203- | (mN)#(mN)#(mN)#(mN)(mN)(mN)(dN)#(mN)(mN)(mN)(mN)(fN)(mN)(fN)(mN)(fN) |
| V1.34 | (mN)(mN)(fN)(mN)(fN)(mN)(mN)(mN)(mG)(dT)#(rU)(mG)(mU)(mA)(mG)(mC)(dT) |
| | #(rC)(mC)(dC)#(dT)#(mU)(mU)(mC)(mU)(mC)(mA)(mU)(mU)#(mU)#(mC)#(mG) |
| | (SEQ ID NO: 92); or |
| CR48-203- | (mN)#(mN)#(mN)#(mN)(mN)(mN)(dN)#(mN)(mN)(mN)(mN)(fN)(mN)(fN)(mN)(fN) |
| V1.36 | (mN)(mN)(fN)(mN)(fN)(mN)(mN)(mN)(mG)(dT)#(rU)(mG)(mU)(mA)(mG)(mC)(dT) |
| | #(rC)(mC)(mC)(dT)#(mU)(mU)(mC)(mU)(mC)(mA)(mU)(mU)#(mU)#(mC)#(mG) |
| | (SEQ ID NO: 93) |

wherein rN=RNA, mN=2′-O-methyl RNA, fN=2′-fluoro RNA, N #N=phosphorothioate linkage, and N=any nucleotide.

67-70. (canceled)

71. The chemically modified Nme gRNA of claim 66, further comprising a nucleotide or non-nucleotide loop or linker linking the 3′ end of the crRNA portion to the 5′ end of the tracrRNA portion, optionally wherein:
the nucleotide loop is chemically modified, optionally wherein:
the nucleotide loop comprises the nucleotide sequence of GAAA, optionally wherein:
the nucleotide loop comprises the nucleotide sequence of (mG)(mA)(mA)(mA), wherein mN corresponds to a 2′-O-methyl RNA and N corresponds to any nucleotide, optionally wherein:
the non-nucleotide linker comprises an azide linker, an ethylene glycol oligomer, a tetrazine linker, an alkyl chain, a peptide, an amide, or a carbamate.

72-75. (canceled)

76. A chemically modified Neisseria meningitidis (Nme) single guide RNA (sgRNA) comprising one or more chemical modifications.

77. The chemically modified Nme sgRNA of claim 76, wherein:
the sgRNA is between 99 and 145 nucleotides in length;
the sgRNA is 145 nucleotides in length, 121 nucleotides in length, 111 nucleotides in length, 107 nucleotides in length, 105 nucleotides in length, 103 nucleotides in length, 102 nucleotides in length, 101 nucleotides in length, 100 nucleotides in length, or 99 nucleotides in length;
the one or more chemical modifications are each independently selected from a modification of a ribose group, a phosphate group, a nucleobase, or a combination thereof;
each modification of the ribose group is independently selected from the group consisting of 2′-O-methyl, 2′-fluoro, 2′-deoxy, 2′-O-(2-methoxyethyl) (MOE), 2′-NH₂ (2′-amino), 4′-thio, a bicyclic nucleotide, a locked nucleic acid (LNA), a 2′-(S)-constrained ethyl (5-cEt), a constrained MOE, and a 2′-O,4′-C-aminomethylene bridged nucleic acid (2′,4′-BNA^{NC});
at least 40%, 80%, or 100% of the ribose groups are chemically modified;
each modification of the phosphate group is independently selected from the group consisting of a phosphorothioate, phosphonoacetate (PACE), thiophosphonoacetate (thioPACE), amide, triazole, phosphonate, or phosphotriester modification; and/or
each modification of the nucleobase group is independently selected from the group consisting of 2-thiouridine, 4-thiouridine, N⁶-methyladenosine, pseudouridine, 2,6-diaminopurine, inosine, thymidine, 5-methylcytosine, 5-substituted pyrimidine, isoguanine, isocytosine, and halogenated aromatic groups.

78-85. (canceled)

86. The chemically modified Nme sgRNA of claim 77, comprising:
at least 40%, 80%, 90%, or 100% modified nucleotides;
between 2 and 100 modified nucleotides;
at least one chemical modification in the nucleotide sequence of any one of:
(SEQ ID NO: 97)
(N)ₓGUUGUAGCUCCCUUUCUCAUUUCGGAAACGAAAUGAGAACCGUUGC
UACAAUAAGGCCGUCUGAAAAGAUGUGCCGCAACGCUCUGCCCCUUAAAG
CUUCUGCUUUAAGGGGCAUCGUUUA (SG-145NT);
(SEQ ID NO: 98)
(N)ₓGUUGUAGCUCCCGAAACGUUGCUACAAUAAGGCCGUCUGAAAAGAU
GUGCCGCAACGCUCUGCCCCUUAAAGCUUCUGCUUUAAGGGGCAUCGUU
(SG-121NTv1);
(SEQ ID NO: 99)
(N)ₓGUUGUAGCUCCCGAAACGUUGCUACAAUAAGGCCGUCUGAAAAGAU
GUGCCGCAACGCUCUGCCCCUUAAAGCUUCUGCUUUAAGGGGCAUCGUU
UA (SG-121NTv2);
(SEQ ID NO: 100)
(N)ₓGUUGUAGCUCCCGAAACGUUGCUACAAUAAGGCCGUCUGAAAAGAU
GUGCCGCAACGCUCUGCCCCUUUUCUAAGGGGCAUCGUUUA
(SG-11INT);
(SEQ ID NO: 101)
(N)ₓGUUGUAGCUCCCGAAACGUUGCUACAAUAAGGCCGUCUGAAAAGAU
GUGCCGCAACGCUCUGCCCCUUUCUAGGGGCAUCGUU (SG-107NT);
(SEQ ID NO: 102)
(N)ₓGUUGUAGCUCCCGAAACGUUGCUACAAUAAGGCCGUCUGAAAAGAU
GUGCCGCAACGCUCUGCCCCUUCUGGGGCAUCGUU(SG-105NTv1):
(SEQ ID NO: 103)
(N)ₓGUUGUAGCUCCCGAAACGUUGCUACAAUAAGGCCGUCUGAAAAGAU
GUGCCGCAACGCUCUGCCCCUUUUCUAAGGGGCAU (SG-105NTv2);
(SEQ ID NO: 104)
(N)ₓGUUGUAGCUCCCGAAACGUUGCUACAAUAAGGCCGUCUGAAAAGAU
GUGCCGCAACGCUCUGCCUUCUGGCAUCGUUUA (SG-103NTv1):
(SEQ ID NO: 105)
(N)_{X}GUUGUAGCUCCCGAAACGUUGCUACAAUAAGGCCGUCUGAAAAGAU
GUGCCGCAACGCUCUGCCCUUCUGGGCAUCGUU (SG-103NTV2);
(SEQ ID NO: 106)
(N)ₓGUUGUAGCUCCCGAAACGUUGCUACAAUAAGGCCGUCUGAAAAGAU
GUGCCGCAACGCUCUGCUUCUGCAUCGUUUA (SG-101NTv1);
or
(SEQ ID NO: 107)
(N)ₓGUUGUAGCUCCCGAAACGUUGCUACAAUAAGGCCGUCUGAAAAGAU
GUGCCGCAACGCUCUGCUUCUGCAUCGUU (SG-99NT),
wherein N corresponds to any nucleotide and x corresponds to any integer between 18 and 26.

87-91. (canceled)

92. A chemically modified Neisseria meningitidis (Nme) single guide RNA (sgRNA) comprising a chemical modification pattern selected from anyone of:
(SEQ ID NO: 108)
(mN)#(mN)#(mN)#(rN)(rN)(rN)(rN)(rN)(rN)(rN)(rN)
(rN)(rN)(rN)(rN)(rN)(rN)(rN)(rN)(rN)(rN)(rN)
(rN)(rN)(rG)(rU)(rU)(rG)(rU)(rA)(rG)(rC)(rU)(rC)
(rC)(rC)(mG)(mA)(mA)(mA)(rC)(rG)(rU)(rU)(rG)(rC)
(rU)(rA)(rC)(rA)(rA)(rU)(rA)(rA)(rG)(rG)(rC)(rC)
(rG)(rU)(mC)(mU)(mG)(mA)(mA)(mA)(mA)(mG)(rA)(rU)
(rG)(rU)(rG)(rC)(rC)(rG)(rC)(rA)(rA)(rC)(rG)(rC)
(rU)(rC)(rU)(rG)(rC)(rC)(mU)(mU)(mC)(mU)(rG)(rG)
(rC)(rA)(rU)(rC)(rG)(rU)#(mU)#(mU)#(mA)(SG-1);
(SEQ ID NO: 109)
(mN)#(mN)#(mN)#(rN)(rN)(rN)(rN)(rN)(rN)(rN)(rN)
(rN)(rN)(rN)(rN)(rN)(rN)(rN)(rN)(rN)(rN)(rN)
(rN)(rN)(rG)(rU)(rU)(rG)(rU)(mA)(mG)(mC)(rU)(rC)
(rC)(rC)(mG)(mA)(mA)(mA)(rC)(rG)(rU)(rU)(rG)(rC)
(rU)(rA)(rC)(rA)(rA)(rU)(rA)(rA)(rG)(rG)(mC)(mC)
(rG)(mU)(mC)(mU)(mG)(mA)(mA)(mA)(mA)(mG)(rA)(rU)
(rG)(rU)(rG)(rC)(rC)(rG)(rC)(rA)(rA)(rC)(rG)(rC)
(mU)(mC)(mU)(mG)(rC)(rC)(mU)(mU)(mC)(mU)(rG)(rG)
(rC)(rA)(rU)(mC)(mG)(mU)#(mU)#(mU)#(mA)(SG-2);
(SEQ ID NO: 110)
(mN)#(mN)#(mN)#(mN)(mN)(rN)(rN)(rN)(mN)(mN)(mN)
(rN)(mN)(rN)(rN)(rN)(rN)(mN)(rN)(rN)(rN)(mN)(rN)
(rN)(mG)(rU)(rU)(rG)(mU)(mA)(mG)(mC)(rU)(rC)(rC)
(rC)(mG)(mA)(mA)(mA)(mC)(rG)(mU)(rU)(mG)(mC)(rU)
(mA)(mC)(rA)(rA)(rU)(rA)(mA)(rG)(mG)(mC)(mC)(mG)
(mU)(mC)(mU)(mG)(mA)(mA)(mA)(mA)(mG)(mA)(mU)(rG)
(mU)(mG)(mC)(mC)(mG)(mC)(mA)(mA)(mC)(mG)(mC)(mU)
(mC)(mU)(mG)(mC)(mC)(mU)(mU)(mC)(mU)(rG)(mG)(rC)
(mA)(mU)(mC)(mG)(mU)#(mU)#(mU)#(mA)(SG-3);
(SEQ ID NO: 111)
(mN)#(mN)#(mN)#(mN)(mN)(rN)(rN)(rN)(mN)(mN)(mN)
(rN)(mN)(rN)(rN)(mN)(rN)(mN)(rN)(rN)(rN)(mN)(rN)
(rN)(mG)(rU)(rU)(rG)(mU)(mA)(mG)(mC)(rU)(rC)(rC)
(rC)(mG)(mA)(mA)(mA)(mC)(rG)(mU)(rU)(mG)(mC)(rU)
(mA)(mC)(rA)(rA)(rU)(rA)(mA)(rG)(mG)(fC)(mC)(fG)
(mU)(fC)(mU)(fG)(mA)(fA)(mA)(fA)(mG)(fA)(mU)(rG)
(mU)(fG)(mC)(fC)(mG)(fC)(mA)(fA)(mC)(fG)(mC)(fU)
(mC)(fU)(mG)(fC)(mC)(fU)(mU)(fC)(mU)(rG)(mG)(rC)
(mA)(fU)(mC)(fG)(mU)#(mU)#(mU)#(mA)(SG-4);
(SEQ ID NO: 112)
(mN)#(mN)#(mN)#(mN)(mN)(rN)(rN)(rN)(mN)(mN)(mN)
(rN)(mN)(rN)(rN)(rN)(rN)(mN)(rN)(rN)(rN)(mN)(rN)
(rN)(mG)(rU)(rU)(rG)(mU)(mA)(mG)(mC)(rU)(rC)(rC)
(rC)(mG)(mA)(mA)(mA)(rC)(rG)(rU)(rU)(rG)(rC)(rU)
(rA)(rC)(rA)(rA)(rU)(rA)(rA)(rG)(rG)(mC)(mC)(rG)
(mU)(mC)(mU)(mG)(mA)(mA)(mA)(mA)(mG)(rA)(rU)(rG)
(rU)(rG)(rC)(rC)(rG)(rC)(rA)(rA)(rC)(rG)(rC)(mU)
(mC)(mU)(mG)(rC)(rC)(mU)(mU)(mC)(mU)(rG)(rG)(rC)
(rA)(rU)(mC)(mG)(mU)#(mU)#(mU)#(mA)(SG-5);
(SEQ ID NO: 113)
(mN)#(mN)#(mN)#(rN)(mN)(rN)(rN)(rN)(mN)(mN)(rN)
(rN)(mN)(rN)(rN)(rN)(rN)(mN)(rN)(rN)(rN)(mN)(rN)
(rN)(mG)(rU)(rU)(rG)(rU)(mA)(mG)(mC)(rU)(rC)(rC)
(rC)(mG)(mA)(mA)(mA)(rC)(rG)(rU)(rU)(rG)(rC)(rU)
(rA)(rC)(rA)(rA)(rU)(rA)(rA)(rG)(rG)(mC)(mC)(rG)
(mU)(mC)(mU)(mG)(mA)(mA)(mA)(mA)(mG)(rA)(rU)(rG)
(rU)(rG)(rC)(rC)(rG)(rC)(rA)(rA)(rC)(rG)(rC)(mU)
(mC)(mU)(mG)(rC)(rC)(mU)(mU)(mC)(mU)(rG)(rG)(rC)
(rA)(rU)(mC)(mG)(mU)#(mU)#(mU)#(mA)(SG-6);
(SEQ ID NO: 114)
(mN)#(mN)#(mN)#(rN)(rN)(rN)(rN)(rN)(rN)(rN)(rN)
(rN)(rN)(rN)(rN)(rN)(rN)(mN)(rN)(rN)(rN)(mN)(rN)
(rN)(rG)(rU)(rU)(rG)(rU)(mA)(mG)(mC)(rU)(rC)(rC)
(rC)(mG)(mA)(mA)(mA)(rC)(rG)(rU)(rU)(rG)(rC)(rU)
(rA)(rC)(rA)(rA)(rU)(rA)(rA)(rG)(rG)(mC)(mC)(rG)
(mU)(mC)(mU)(mG)(mA)(mA)(mA)(mA)(mG)(rA)(rU)(rG)
(rU)(rG)(rC)(rC)(rG)(rC)(rA)(rA)(rC)(rG)(rC)(mU)
(mC)(mU)(mG)(rC)(rC)(mU)(mU)(mC)(mU)(rG)(rG)(rC)
(rA)(rU)(mC)(mG)(mU)#(mU)#(mU)#(mA)(SG-7);
(SEQ ID NO: 115)
(mN)#(mN)#(mN)#(mN)(mN)(mN)(mN)(mN)(mN)(mN)(mN)
(mN)(mN)(mN)(rN)(rN)(rN)(rN)(rN)(rN)(rN)(rN)(rN)
(rN)(rG)(rU)(rU)(rG)(rU)(mA)(mG)(mC)(rU)(rC)(rC)
(rC)(mG)(mA)(mA)(mA)(rC)(rG)(rU)(rU)(rG)(rC)(rU)
(rA)(rC)(rA)(rA)(rU)(rA)(rA)(rG)(rG)(mC)(mC)(rG)
(mU)(mC)(mU)(mG)(mA)(mA)(mA)(mA)(mG)(rA)(rU)(rG)
(rU)(rG)(rC)(rC)(rG)(rC)(rA)(rA)(rC)(rG)(rC)(mU)
(mC)(mU)(mG)(rC)(rC)(mU)(mU)(mC)(mU)(rG)(rG)(rC)
(rA)(rU)(mC)(mG)(mU)#(mU)#(mUX#(mA)(SG-8);
(SEQ ID NO: 116)
(mN)#(mN)#(mN)#(mN)(mN)(mN)(mN)(mN)(mN)(mN)(mN)
(mN)(mN)(mN)(rN)(rN)(rN)(mN)(rN)(rN)(rN)(mN)(rN)
(rN)(mG)(rU)(rU)(rG)(mU)(mA)(mG)(mC)(rU)(rC)(rC)
(rC)(mG)(mA)(mA)(mA)(rC)(rG)(rU)(rU)(rG)(rC)(rU)
(rA)(rC)(rA)(rA)(rU)(rA)(rA)(rG)(rG)(mC)(mC)(rG)
(mU)(mC)(mU)(mG)(mA)(mA)(mA)(mA)(mG)(rA)(rU)(rG)
(rU)(rG)(rC)(rC)(rG)(rC)(rA)(rA)(rC)(rG)(rC)(mU)
(mC)(mU)(mG)(rC)(rC)(mU)(mU)(mC)(mU)(rG)(rG)(rC)
(rA)(rU)(mC)(mG)(mU)#(mU)#(mU)#(mA)(SG-9);
(SEQ ID NO: 117)
(mN)#(mN)#(mN)#(mN)(mN)(rN)(rN)(rN)(mN)(mN)(mN)
(rN)(mN)(rN)(rN)(rN)(rN)(mN)(rN)(rN)(rN)(mN)(rN)
(rN)(mG)(rU)(rU)(rG)(mU)(mA)(mG)(mC)(rU)(rC)(rC)
(rC)(mG)(mA)(mA)(mA)(rC)(rG)(rU)(rU)(rG)(rC)(rU)
(rA)(rC)(rA)(rA)(rU)(rA)(mA)(rG)(mG)(mC)(mC)(mG)
(mU)(mC)(mU)(mG)(mA)(mA)(mA)(mA)(mG)(mA)(mU)(rG)
(rU)(mG)(mC)(mC)(rG)(rC)(rA)(rA)(rC)(rG)(rC)(mU)
(mC)(mU)(mG)(rC)(rC)(mU)(mU)(mC)(mU)(rG)(rG)(rC)
(rA)(rU)(mC)(mG)(mU)#(mU)#(mU)#(mA)(SG-10);
(SEQ ID NO: 118)
(mN)#(mN)#(mN)#(mN)(mN)(rN)(rN)(rN)(mN)(mN)(mN)
(rN)(mN)(rN)(rN)(rN)(rN)(mN)(rN)(rN)(rN)(mN)(rN)
(rN)(mG)(rU)(rU)(rG)(mU)(mA)(mG)(mC)(rU)(rC)(rC)
(rC)(mG)(mA)(mA)(mA)(rC)(rG)(rU)(rU)(rG)(rC)(rU)
(rA)(rC)(rA)(rA)(rU)(rA)(rA)(rG)(rG)(mC)(mC)(rG)
(mU)(mC)(mU)(mG)(mA)(mA)(mA)(mA)(mG)(rA)(rU)(rG)
(rU)(rG)(rC)(rC)(mG)(rC)(mA)(mA)(mC)(mG)(mC)(mU)
(mC)(mU)(mG)(mC)(mC)(mU)(mU)(mC)(mU)(rG)(mG)(rC)
(mA)(rU)(mC)(mG)(mU)#(mU)#(mU)#(mA)(SG-11);
(SEQ ID NO: 119)
(mN)#(mN)#(mN)#(mN)(mN)(rN)(rN)(rN)(mN)(mN)(mN)
(rN)(mN)(rN)(rN)(rN)(rN)(mN)(rN)(rN)(rN)(mN)(rN)
(rN)(fG)(rU)(rU)(rG)(fU)(fA)(fG)(fC)(rU)(rC)(rC)
(rC)(mG)(mA)(mA)(mA)(rC)(rG)(rU)(rU)(rG)(rC)(rU)
(rA)(rC)(rA)(rA)(rU)(rA)(rA)(rG)(rG)(fC)(fC)(rG)
(fU)(fC)(fU)(mG)(mA)(mA)(mA)(fA)(fG)(rA)(rU)(rG)
(rU)(rG)(rC)(rC)(rG)(rC)(rA)(rA)(rC)(rG)(rC)(mU)
(mC)(fU)(fG)(rC)(rC)(mU)(mU)(mC)(mU)(rG)(rG)(rC)
(rA)(rU)(fC)(fG)(fU)#(fU)#(mU)#(mA)(SG-12);
(SEQ ID NO: 120)
(mN)#(mN)#(mN)#(mN)(mN)(rN)(rN)(rN)(mN)(mN)(mN)
(rN)(mN)(rN)(rN)(rN)(rN)(mN)(rN)(rN)(rN)(mN)(rN)
(rN)(fG)(rU)(rU)(rG)(fU)(fA)(fG)(fC)(rU)(rC)(rC)
(rC)(mG)(mA)(mA)(mA)(mC)(rG)(mU)(rU)(fG)(fC)(rU)
(fA)(fC)(rA)(rA)(rU)(rA)(rA)(rG)(rG)(mC)(mC)(rG)
(mU)(mC)(mU)(mG)(mA)(mA)(mA)(mA)(mG)(rA)(rU)(rG)
(rU)(rG)(rC)(rC)(rG)(rC)(rA)(rA)(rC)(rG)(rC)(mU)
(mC)(mU)(mG)(rC)(rC)(mU)(mU)(mC)(mU)(rG)(rG)(rC)
(rA)(rU)(mC)(mG)(mU)#(mU)#(mU)#(mA)(SG-13);
(SEQ ID NO: 121)
(mN)#(mN)#(mN)#(mN)(mN)(rN)(rN)(rN)(mN)(mN)(mN)
(rN)(mN)(rN)(rN)(rN)(rN)(mN)(rN)(rN)(rN)(mN)(rN)
(rN)(fG)(rU)(rU)(rG)(fU)(fA)(fG)(fC)(rU)(rC)(rC)
(rC)(mG)(mA)(mA)(mA)(mC)(rG)(mU)(rU)(fG)(fC)(rU)
(fA)(fC)(rA)(rA)(rU)(rA)(rA)(rG)(rG)(fC)(fC)(rG)
(fU)(fC)(fU)(mG)(mA)(mA)(mA)(fA)(fG)(rA)(rU)(rG)
(rU)(rG)(rC)(rC)(rG)(rC)(rA)(rA)(rC)(rG)(rC)(mU)
(mC)(fU)(fG)(rC)(rC)(mU)(mU)(mC)(mU)(rG)(rG)(rC)
(rA)(rU)(fC)(fG)(fU)#(fU)#(mU)#(mA)(SG-14);
(SEQ ID NO: 122)
mN#mN#mN#rNrNrNrNrNrNrNrNrNrNrNrNrNrNrNrNrNrNr
NrNrNrGrUrUrGrUrArGrCrUrCrCrCrGrArArArCrGrUrUr
GrCrUrArCrArArUrArArGrGrCrCrGrUrCrUrGrArArArAr
GrArUrGrUrGrCrCrGrCrArArCrGrCrUrCrUrGrCrCrCrCr
UrUrArArArGrCrUrCrCrUrGrCrUrUrUrArArGrGrGrGrCr
ArUrCrGrUmU#mU#mA(SG121-0);
(SEQ ID NO: 123)
mN#mN#mN#mNmNrNrNrNrNrNrNrNrNrNrNrNrNrNrNrNrNr
NrNrNrGrUrUrGrUrArGrCrUrCrCrCmGmAmAmArCrGrUrUr
GrCrUrArCrArArUrArArGrGrCrCrGmUmCmUmGmAmAmAmAm
GrArUrGrUrGrCrCrGrCrArArCrGrCrUrCrUrGrCrCmCmCm
UmUmAmAmAmGmCmUmCmCmUmGmCmUmUmUmAmAmGmGrGrGrCr
ArUmCmGmU#mU#mU#mA(SG121-2);
(SEQ ID NO: 124)
mN#mN#mN#mNmNrNrNrNmNmNmNrNmNrNrNrNrNmNrNrNrNm
NrNrNmGrUrUrGmUmAmGmCrUrCrCrCmGmAmAmArCrGrUrUr
GrCrUrArCrArArUrArArGrGrCrCrGmUmCmUmGmAmAmAmAm
GrArUrGrUrGrCrCrGrCrArArCrGrCrUrCrUrGrCrCmCmCm
UmUmAmAmAmGmCmUmCmCmUmGmCmUmUmUmAmAmGmGrGrGrCr
ArUmCmGmU#mU#mU#mA(SG121-3);
and
(SEQ ID NO: 125)
mN#mN#mN#mNmNmNmNmNmNmNmNmNmNmNrNrNrNmNrNrNrNm
NrNrNmGrUrUrGmUmAmGmCrUrCrCrCmGmAmAmArCrGrUrUr
GrCrUrArCrArArUrArArGrGrCrCrGmUmCmUmGmAmAmAmAm
GrArUrGrUrGrCrCrGrCrArArCrGrCrUrCrUrGrCrCmCmCm
UmUmAmAmAmGmCmUmCmCmUmGmCmUmUmUmAmAmGmGrGrGrCr
ArUmCmGmU#mU#mU#mA(SG121-4),
wherein rN=RNA, mN=2′-O-methyl RNA, fN=2′-fluoro RNA, N #N=phosphorothioate linkage, and N=any nucleotide.

93. The chemically modified Nme gRNA of claim 1, further comprising at least one moiety conjugated to the gRNA or sgRNA, optionally wherein:
the at least one moiety is conjugated to at least one of the 5′ end of the crRNA portion, the 3′ end of the crRNA portion, the 5′ end of the tracrRNA portion, the 3′ end of the tracrRNA portion, the 5′ end of the sgRNA, and the 3′ end of the sgRNA, optionally wherein:
the at least one moiety increases cellular uptake of the gRNA or sgRNA, optionally wherein:
the at least one moiety promotes specific tissue distribution of the gRNA or sgRNA, optionally wherein:
the at least one moiety is selected from the group consisting of fatty acids, steroids, secosteroids, lipids, gangliosides analogs, nucleoside analogs, endocannabinoids, vitamins, receptor ligands, peptides, aptamers, and alkyl chains, optionally wherein:
the at least one moiety is selected from the group consisting of cholesterol, docosahexaenoic acid (DHA), docosanoic acid (DCA), lithocholic acid (LA), GalNAc, amphiphilic block copolymer (ABC), hydrophilic block copolymer (HBC), poloxamer, Cy5, and Cy3, optionally wherein:
the at least one moiety is conjugated to the gRNA or sgRNA via a linker, optionally wherein:
the linker is selected from the group consisting of an ethylene glycol chain, an alkyl chain, a polypeptide, a polysaccharide, and a block copolymer, optionally wherein:
the at least one moiety is a modified lipid, optionally wherein:
modified lipid is a branched lipid, optionally wherein:
modified lipid is a branched lipid of Formula I,
X-MC(═Y)M-Z-[L-MC(═Y)M-R]n, Formula I:
where X is a moiety that links the lipid to the gRNA or sgRNA, each Y is independently oxygen or sulfur, each M is independently CH₂, NH, O or S, Z is a branching group which allows two or three (“n”) chains to be joined to a chemically modified guide RNA, L is an optional linker moiety, and each R is independently a saturated, monounsaturated or polyunsaturated linear or branched moiety from 2 to 30 atoms in length, a sterol, or other hydrophobic group, optionally wherein:
modified lipid is a headgroup-modified lipid, optionally wherein:
modified lipid is a headgroup-modified lipid of Formula II,
X-MC(═Y)M-Z-[L-MC(═Y)M-R]n-L-K-J, Formula II:
where X is a moiety that links the lipid to the gRNA or sgRNA, each Y is independently oxygen or sulfur, each M is independently CH₂, NH, N-alkyl, 0 or S, Z is a branching group which allows two or three (“n”) chains to be joined to chemically modified guide RNA, each L is independently an optional linker moiety, and R is a saturated, monounsaturated or polyunsaturated linear or branched moiety from 2 to 30 atoms in length, a sterol, or other hydrophobic group, K is a phosphate, sulfate, or amide and J is an aminoalkane or quaternary aminoalkane group.

94-105. (canceled)

106. The chemically modified Nme gRNA of claim 1, wherein the guide RNA binds to a N. meningitidis Cas9 nuclease (NmeCas9) or variant thereof, optionally wherein:
the Nme Cas9 nuclease or variant thereof is Nme1Cas9, Nme2Cas9, or Nme3Cas9, optionally wherein:
the Nme Cas9 nuclease or variant thereof comprises an amino acid sequence with at least 80% identity to an amino acid sequence set forth in SEQ ID NO: 1, 2, or 3, optionally wherein:
the NmeCas9 further comprises one or more nuclear localization signal (NLS) polypeptides, optionally wherein:
the NLS polypeptide comprises one or both of a nucleoplasmin NLS and an SV40 NLS, optionally wherein:
the NmeCas9 is a variant NmeCas9, optionally wherein:
wherein the variant NmeCas9 comprises one or both of a D16A mutation and a H588A mutation, optionally wherein:
wherein the NmeCas9 or variant NmeCas9 is fused to a nucleotide deaminase, optionally wherein:
the nucleotide deaminase is a cytidine deaminase, optionally wherein:
the nucleotide deaminase is an adenosine deaminase, optionally wherein:
NmeCas9 or variant NmeCas9 further comprises a uracil glycosylase inhibitor, optionally wherein:
Cas9 off-target activity is reduced relative to an unmodified gRNA or sgRNA, optionally wherein:
Cas9 on-target activity is increased relative to an unmodified gRNA or sgRNA, optionally wherein:
the chemically modified Nme gRNA or sgRNA comprises at least about 50% activity relative to an unmodified gRNA or sgRNA.

107-119. (canceled)

120. A method of altering expression of a target gene in a cell, comprising contacting the cell with a genome editing system comprising:
the chemically modified Nme gRNA of claim 1; and
an RNA-guided nuclease or a polynucleotide encoding an RNA-guided nuclease.

121. The method of claim 120, wherein:
the target gene is in a cell in an organism;
the contacting occurs in vivo or ex vivo or in vitro;
expression of the target gene is knocked out or knocked down;
the sequence of the target gene is modified, edited, corrected or enhanced;
the guide RNA and the RNA-guided nuclease comprise a ribonucleoprotein (RNP) complex; and/or
the RNA-guided nuclease is an N. meningitidis Cas9 (NmeCas9), optionally wherein:
the Nme Cas9 is Nme1Cas9, Nme2Cas9, or Nme3Cas9, optionally wherein:
the NmeCas9 further comprises one or more nuclear localization signal (NLS) polypeptides, optionally wherein:
the NLS polypeptide comprises one or both of a nucleoplasmin NLS and an SV40 NLS;
the NmeCas9 is a variant NmeCas9, optionally wherein:
the variant NmeCas9 comprises one or both of a D16A mutation and a H588A mutation, optionally wherein:
the NmeCas9 or variant NmeCas9 is fused to a nucleotide deaminase, optionally wherein:
the nucleotide deaminase is a cytidine deaminase or an adenosine deaminase, optionally wherein:
NmeCas9 or variant NmeCas9 further comprises a uracil glycosylase inhibitor, optionally wherein:
the polynucleotide encoding an RNA-guided nuclease comprises a vector, optionally wherein:
the vector further comprises a polynucleotide encoding a crRNA portion or a tracrRNA portion, optionally wherein:
the vector is a viral vector, optionally wherein:
the viral vector is an adeno-associated virus (AAV) vector, an adenovirus vector, or a lentivirus (LV) vector, optionally wherein:
the polynucleotide encoding an RNA-guided nuclease comprises an mRNA, optionally wherein:
the mRNA is formulated in a lipid nanoparticle (LNP), optionally wherein:
the LNP comprises at least one cationic lipid, optionally wherein:
the LNP further comprises a PEGylated lipid, a helper lipid, and cholesterol or derivative thereof, optionally wherein:
expression of the target gene is reduced by at least about 20%.

122-145. (canceled)

146. A CRISPR genome editing system comprising:
a chemically modified gRNA of claim 1; and
an RNA-guided nuclease or a polynucleotide encoding an RNA-guided nuclease.

147. (canceled)

148. A ribonucleoprotein (RNP) complex comprising:
i) a Neisseria meningitidis (Nme) Cas9 nuclease; and
ii) a chemically modified Nme guide RNA (gRNA), wherein the Nme gRNA comprises:
(a) a crRNA portion comprising (i) a guide sequence capable of hybridizing to a target polynucleotide sequence, and (ii) a repeat sequence; and
(b) a tracrRNA portion comprising an anti-repeat nucleotide sequence that is complementary to the repeat sequence,
wherein the crRNA portion comprises at least 40% modified nucleotides.

149. The RNP complex of claim 148, wherein the gRNA is capable of binding to the Nme Cas9 nuclease or variant thereof and/or wherein the Nme Cas9 or variant thereof is Nme1Cas9, Nme2Cas9, or Nme3Cas9.

150. (canceled)

The application's sequence listing, which the Patent Office published only in electronic form, follows.

SEQUENCE LISTING (465 sequences)

SEQ ID NO: 1 - protein, 1081 aa, synthetic construct
AAFKPNSINYILGLDIGIASVGWAMVEIDEEENPIRLIDLGVRVFERAEVPKTGDSLAMARRLARSVRRLTRRRAHRLLRTRRLLKREGVLQAANFDENGLIKSLPNTPWQLRAAALDRKLTPLEWSAVLLHLIKHRGYLSQRKNEGETADKELGALLKGVAGNAHALQTGDFRTPAELALNKFEKESGHIRNQRSDYSHTFSRKDLQAELILLFEKQKEFGNPHVSGGLKEGIETLLMTQRPALSGDAVQKMLGHCTFEPAEPKAAKNTYTAERFIWLTKLNNLRILEQGSERPLTDTERATLMDEPYRKSKLTYAQARKLLGLEDTAFFKGLRYGKDNAEASTLMEMKAYHAISRALEKEGLKDKKSPLNLSPELQDEIGTAFSLFKTDEDITGRLKDRIQPEILEALLKHISFDKFVQISLKALRRIVPLMEQGKRYDEACAEIYGDHYGKKNTEEKIYLPPIPADEIRNPVVLRALSQARKVINGVVRRYGSPARIHIETAREVGKSFKDRKEIEKRQEENRKDREKAAAKFREYFPNFVGEPKSKDILKLRLYEQQHGKCLYSGKEINLGRLNEKGYVEIDHALPFSRTWDDSFNNKVLVLGSENQNKGNQTPYEYFNGKDNSREWQEFKARVETSRFPRSKKQRILLQKFDEDGFKERNLNDTRYVNRFLCQFVADRMRLTGKGKKRVFASNGQITNLLRGFWGLRKVRAENDRHHALDAVVVACSTVAMQQKITRFVRYKEMNAFDGKTIDKETGEVLHQKTHFPQPWEFFAQEVMIRVFGKPDGKPEFEEADTLEKLRTLLAEKLSSRPEAVHEYVTPLFVSRAPNRKMSGQGHMETVKSAKRLDEGVSVLRVPLTQLKLKDLEKMVNREREPKLYEALKARLEAHKDDPAKAFAEPFYKYDKAGNRTQQVKAVRVEQVQKTGVWVRNHNGIADNATMVRVDVFEKGDKYYLVPIYSWQVAKGILPDRAVVQGKDEEDWQLIDDSFNFKFSLHPNDLVEVITKKARMFGYFASCHRGTGNINIRIHDLDHKIGKNGILEGIGVKTALSFQKYQIDELGKEIRPCRLKKRPPVR

SEQ ID NO: 2 - protein, 1081 aa, synthetic construct
AAFKPNPINYILGLDIGIASVGWAMVEIDEEENPIRLIDLGVRVFERAEVPKTGDSLAMARRLARSVRRLTRRRAHRLLRARRLLKREGVLQAADFDENGLIKSLPNTPWQLRAAALDRKLTPLEWSAVLLHLIKHRGYLSQRKNEGETADKELGALLKGVANNAHALQTGDFRTPAELALNKFEKESGHIRNQRGDYSHTFSRKDLQAELILLFEKQKEFGNPHVSGGLKEGIETLLMTQRPALSGDAVQKMLGHCTFEPAEPKAAKNTYTAERFIWLTKLNNLRILEQGSERPLTDTERATLMDEPYRKSKLTYAQARKLLGLEDTAFFKGLRYGKDNAEASTLMEMKAYHAISRALEKEGLKDKKSPLNLSSELQDEIGTAFSLFKTDEDITGRLKDRVQPEILEALLKHISFDKFVQISLKALRRIVPLMEQGKRYDEACAEIYGDHYGKKNTEEKIYLPPIPADEIRNPVVLRALSQARKVINGVVRRYGSPARIHIETAREVGKSFKDRKEIEKRQEENRKDREKAAAKFREYFPNFVGEPKSKDILKLRLYEQQHGKCLYSGKEINLVRLNEKGYVEIDHALPFSRTWDDSFNNKVLVLGSENQNKGNQTPYEYFNGKDNSREWQEFKARVETSRFPRSKKQRILLQKFDEDGFKECNLNDTRYVNRFLCQFVADHILLTGKGKRRVFASNGQITNLLRGFWGLRKVRAENDRHHALDAVVVACSTVAMQQKITRFVRYKEMNAFDGKTIDKETGKVLHQKTHFPQPWEFFAQEVMIRVFGKPDGKPEFEEADTPEKLRTLLAEKLSSRPEAVHEYVTPLFVSRAPNRKMSGAHKDTLRSAKRFVKHNEKISVKRVWLTEIKLADLENMVNYKNGREIELYEALKARLEAYGGNAKQAFDPKDNPFYKKGGQLVKAVRVEKTQESGVLLNKKNAYTIADNGDMVRVDVFCKVDKKGKNQYFIVPIYAWQVAENILPDIDCKGYRIDDSYTFCFSLHKYDLIAFQKDEKSKVEFAYYINCDSSNGRFYLAWHDKGSKEQQFRISTQNLVLIQKYQVNELGKEIRPCRLKKRPPVR

SEQ ID NO: 3 - protein, 1080 aa, synthetic construct
AAFKPNPINYILGLDIGIASVGWAMVEIDEEENPIRLIDLGVRVFERAEVPKTGDSLAMARRLARSVRRLTRRRAHRLLRARRLLKREGVLQAADFDENGLIKSLPNTPWQLRAAALDRKLTPLEWSAVLLHLIKHRGYLSQRKNEGETADKELGALLKGVADNAHALQTGDFRTPAELALNKFEKECGHIRNQRGDYSHTFSRKDLQAELNLLFEKQKEFGNPHVSGGLKEGIETLLMTQRPALSGDAVQKMLGHCTFEPAEPKAAKNTYTAERFIWLTKLNNLRILEQGSERPLTDTERATLMDEPYRKSKLTYAQARKLLSLEDTAFFKGLRYGKDNAEASTLMEMKAYHTISRALEKEGLKDKKSPLNLSPELQDEIGTAFSLFKTDEDITGRLKDRIQPEILEALLKHISFDKFVQISLKALRRIVPLMEQGKRYDEACAEIYGDHYGKKNTEEKIYLPPIPADEIRNPVVLRALSQARKVINGVVRRYGSPARIHIETAREVGKSFKDRKEIEKRQEENRKDREKAAAKFREYFPNFVGEPKSKDILKLRLYEQQHGKCLYSGKEINLGRLNEKGYVEIDHALPFSRTWDDSFNNKVLVLGSENQNKGNQTPYEYFNGKDNSREWQEFKARVETSRFPRSKKQRILLQKFDEDGFKERNLNDTRYVNRFLCQFVADRMRLTGKGKKRVFASNGQITNLLRGFWGLRKVRAENDRHHALDAVVVACSTVAMQQKITRFVRYKEMNAFDGKTIDKETGEVLHQKTHFPQPWEFFAQEVMIRVFGKPDGKPEFEEADTPEKLRTLLAEKLSSRPEAVHEYVTPLFVSRAPNRKMSGQGHMETVKSAKRLDEGVSVLRVPLTQLKLKDLEKMVNREREPKLYEALKARLEAHKDDPAKAFAEPFYKYDKAGNRTQQVKAVRVEQVQKTGVWVRNHNGIADNATMVRVDVFEKGDKYYLVPIYSWQVAKGILPDRAVVAYADEEDWTVIDESFRFKFVLYSNDLIKVQLKKDSFLGYFSGLDRATGAISLREHDLEKSKGKDGMHRIGVKTALSFQKYQIDEMGKEIRPCRLKKRPPVR

SEQ ID NO: 4 - DNA, 3249 bp, synthetic construct
  source 1..3249: mol_type = other DNA
atggctgccttcaaacctaattcaatcaactacatcctcggcctcgatatcggcatcgcatccgtcggctgggcgatggtagaaattgacgaagaagaaaaccccatccgcctgattgatttgggcgtgcgcgtatttgagcgtgccgaagtaccgaaaacaggcgactcccttgccatggcaaggcgtttggcgcgcagtgttcgccgcctgacccgccgtcgcgcccaccgcctgcttcggacccgccgcctattgaaacgcgaaggcgtattacaagccgccaattttgacgaaaacggcttgattaaatccttaccgaatacaccatggcaacttcgcgcagccgcattagaccgcaaactgacgcctttagagtggtcggcagtcttgttgcatttaatcaaacatcgcggctatttatcgcaacggaaaaacgagggcgaaactgccgataaggagcttggcgctttgcttaaaggcgtagccggcaatgcccatgccttacagacaggcgatttccgcacaccggccgaattggctttaaataaatttgagaaagaaagcggccatatccgcaatcagcgcagcgattattcgcatacgttcagccgcaaagatttacaggcggagctgattttgctgtttgaaaaacaaaaagaatttggcaatccgcatgtttcaggcggccttaaagaaggtattgaaaccctactgatgacgcaacgccctgccctgtccggcgatgccgttcaaaaaatgttggggcattgcaccttcgaaccggcagagccgaaagccgctaaaaacacctacacagccgaacgtttcatctggctgaccaagctgaacaacctgcgtattttagagcaaggcagcgagcggccattgaccgataccgaacgcgccacgcttatggacgagccatacagaaaatccaaactgacttacgcacaagcccgtaagctgctgggtttagaagataccgcctttttcaaaggcttgcgctatggtaaagacaatgccgaagcctcaacattgatggaaatgaaggcctaccatgccatcagccgtgcactggaaaaagaaggattgaaagacaaaaaatccccattaaacctttctcccgaattacaagacgaaatcggcacggcattctccctgttcaaaaccgatgaagacattacaggccgtctgaaagaccgtatacagcccgaaatcttagaagcgctgttgaaacacatcagcttcgataagttcgtccaaatttccttgaaagcattgcgccgaattgtgcctctaatggaacaaggcaaacgttacgatgaagcctgcgccgaaatctacggagaccattacggcaagaagaatacggaagaaaagatttatctgccgccgattcccgccgacgaaatccgcaaccccgtcgtcttgcgcgccttatctcaagcacgtaaggtcattaacggcgtggtacgccgttacggctccccagctcgtatccatattgaaactgcaagggaagtaggtaaatcgtttaaagaccgcaaagaaattgagaaacgccaagaagaaaaccgcaaagaccgggaaaaagccgccgccaaattccgagagtatttccccaattttgtcggagaacccaaatccaaagatattctgaaactgcgcctgtacgagcaacaacacggcaaatgcctgtattcgggcaaagaaatcaacttaggccgtctgaacgaaaaaggctatgtcgaaatcgaccatgccctgccgttctcgcgcacatgggacgacagtttcaacaataaagtactggtattgggcagcgaaaaccaaaacaaaggcaatcaaaccccttacgaatacttcaacggcaaagacaacagccgcgaatggcaggaatttaaagcgcgtgtcgaaaccagccgtttcccgcgcagtaaaaaacaacggattctgctgcaaaaattcgatgaagacggctttaaagaacgcaatctgaacgacacgcgctacgtcaaccgtttcctgtgtcaatttgttgccgaccgtatgcggctgacaggtaaaggcaagaaacgtgtctttgcatccaacggacaaattaccaatctgttgcgcggcttttggggattgcgcaaagtgcgtgcggaaaacgaccgccatcacgccttggacgccgtcgtcgttgcctgctcgaccgttgccatgcagcagaaaattacccgttttgtacgctataaagagatgaacgcgtttgacggtaaaaccatagacaaagaaacaggagaagtgctgcatcaaaaaacacacttcccacaaccttgggaatttttcgcacaagaagtcatgattcgcgtcttcggcaaaccggacggcaaacccgaattcgaagaagccgataccctagaaaaactgcgcacgttgcttgccgaaaaattatcatctcgccccgaagccgtacacgaatacgttacgccactgtttgtttcacgcgcgcccaatcggaagatgagcgggcaagggcatatggagaccgtcaaatccgccaaacgactggacgaaggcgtcagcgtgttgcgcgtaccgctgacacagttaaaactgaaagacttggaaaaaatggtcaatcgggagcgcgaacctaagctatacgaagcactgaaagcacggctggaagcacataaagacgatcctgccaaagcctttgccgagccgttttacaaatacgataaagcaggcaaccgcacccaacaggtaaaagccgtacgcgtagagcaagtacagaaaaccggcgtatgggtgcgcaaccataacggtattgccgacaacgcaaccatggtgcgcgtagatgtgtttgagaaaggcgacaagtattatctggtaccgatttacagttggcaggtagcgaaagggattttgccggatagggctgttgtacaaggaaaagatgaagaagattggcaacttattgatgatagtttcaactttaaattctcattacaccctaatgatttagtcgaggttataacaaaaaaagctagaatgtttggttactttgccagctgccatcgaggcacaggtaatatcaatatacgcattcatgatcttgatcataaaattggcaaaaatggaatactggaaggtatcggcgtcaaaaccgccctttcattccaaaaataccaaattgacgaactgggcaaagaaatcagaccatgccgtctgaaaaaacgcccgcctgtccgttaa

SEQ ID NO: 5 - DNA, 3246 bp, synthetic construct
  source 1..3246: mol_type = other DNA
atggccgccttcaagcctaacccaatcaattacatcctgggactggacatcggaatcgcatccgtgggatgggctatggtggagatcgacgaggaggagaatcctatccggctgatcgatctgggcgtgagagtgtttgagagggccgaggtgccaaagaccggcgattctctggctatggcccggagactggcacggagcgtgaggcgcctgacacggagaagggcacacaggctgctgagggcacgccggctgctgaagagagagggcgtgctgcaggcagcagacttcgatgagaatggcctgatcaagagcctgccaaacaccccctggcagctgagagcagccgccctggacaggaagctgacaccactggagtggtctgccgtgctgctgcacctgatcaagcaccgcggctacctgagccagcggaagaacgagggagagacagcagacaaggagctgggcgccctgctgaagggagtggccaacaatgcccacgccctgcagaccggcgatttcaggacacctgccgagctggccctgaataagtttgagaaggagtccggccacatcagaaaccagaggggcgactatagccacaccttctcccgcaaggatctgcaggccgagctgatcctgctgttcgagaagcagaaggagtttggcaatccacacgtgagcggaggcctgaaggagggaatcgagaccctgctgatgacacagaggcctgccctgtccggcgacgcagtgcagaagatgctgggacactgcaccttcgagcctgcagagccaaaggccgccaagaacacctacacagccgagcggtttatctggctgacaaagctgaacaatctgagaatcctggagcagggatccgagaggccactgaccgacacagagagggccaccctgatggatgagccttaccggaagtctaagctgacatatgcccaggccagaaagctgctgggcctggaggacaccgccttctttaagggcctgagatacggcaaggataatgccgaggcctccacactgatggagatgaaggcctatcacgccatctctcgcgccctggagaaggagggcctgaaggacaagaagtcccccctgaacctgagctccgagctgcaggatgagatcggcaccgccttctctctgtttaagaccgacgaggatatcacaggccgcctgaaggacagggtgcagcctgagatcctggaggccctgctgaagcacatctctttcgataagtttgtgcagatcagcctgaaggccctgagaaggatcgtgccactgatggagcagggcaagcggtacgacgaggcctgcgccgagatctacggcgatcactatggcaagaagaacacagaggagaagatctatctgccccctatccctgccgacgagatcagaaatcctgtggtgctgagggccctgtcccaggcaagaaaagtgatcaacggagtggtgcgccggtacggatctccagcccggatccacatcgagaccgccagagaagtgggcaagagcttcaaggaccggaaggagatcgagaagagacaggaggagaatcgcaaggatcgggagaaggccgccgccaagtttagggagtacttccctaactttgtgggcgagccaaagtctaaggacatcctgaagctgcgcctgtacgagcagcagcacggcaagtgtctgtatagcggcaaggagatcaatctggtgcggctgaacgagaagggctatgtggagatcgatcacgccctgcctttctccagaacctgggacgattcttttaacaataaggtgctggtgctgggcagcgagaaccagaataagggcaatcagacaccatacgagtatttcaatggcaaggacaactccagggagtggcaggagttcaaggcccgcgtggagacctctagatttcccaggagcaagaagcagcggatcctgctgcagaagttcgacgaggatggctttaaggagtgcaacctgaatgacaccagatacgtgaaccggttcctgtgccagtttgtggccgatcacatcctgctgaccggcaagggcaagagaagggtgttcgcctctaatggccagatcacaaacctgctgaggggattttggggactgaggaaggtgcgggcagagaatgacagacaccacgcactggatgcagtggtggtggcatgcagcaccgtggcaatgcagcagaagatcacaagattcgtgaggtataaggagatgaacgcctttgacggcaagaccatcgataaggagacaggcaaggtgctgcaccagaagacccacttcccccagccttgggagttctttgcccaggaagtgatgatccgggtgttcggcaagccagacggcaagcctgagtttgaggaggccgataccccagagaagctgaggacactgctggcagagaagctgtctagcaggccagaggcagtgcacgagtacgtgaccccactgttcgtgtccagggcacccaatcggaagatgtctggcgcccacaaggacacactgagaagcgccaagaggtttgtgaagcacaacgagaagatctccgtgaagagagtgtggctgaccgagatcaagctggccgatctggagaacatggtgaattacaagaacggcagggagatcgagctgtatgaggccctgaaggcaaggctggaggcctacggaggaaatgccaagcaggccttcgacccaaaggataaccccttttataagaagggaggacagctggtgaaggccgtgcgggtggagaagacccaggagagcggcgtgctgctgaataagaagaacgcctacacaatcgccgacaatggcgatatggtgagagtggacgtgttctgtaaggtggataagaagggcaagaatcagtactttatcgtgcctatctatgcctggcaggtggccgagaacatcctgccagacatcgattgcaagggctacagaatcgacgatagctatacattctgtttttccctgcacaagtatgacctgatcgccttccagaaggatgagaagtccaaggtggagtttgcctactatatcaattgcgactcctctaacggcaggttctacctggcctggcacgataagggcagcaaggagcagcagtttcgcatctccacccagaatctggtgctgatccagaagtatcaggtgaacgagctgggcaaggagatcaggccatgtcggctgaagaagcgcccacccgtgcgg

SEQ ID NO: 6 - DNA, 3246 bp, synthetic construct; identical to SEQ ID NO: 5
  source 1..3246: mol_type = other DNA

SEQ ID NO: 7 - DNA, 3246 bp, synthetic construct
  source 1..3246: mol_type = other DNA
atggctgccttcaaacctaatccaatcaactacatcctcggcctcgatatcggcatcgcatccgtcggctgggcgatggtagaaattgacgaagaagaaaaccccatccgcctgattgatttgggcgtgcgcgtatttgagcgtgccgaagtaccgaaaacaggcgactcccttgccatggcaaggcgtttggcgcgcagtgtccgccgcctgacccgccgtcgcgcccatcgcctgcttcgggcccgccgcctattgaaacgcgaaggcgtattacaagccgctgattttgacgaaaacggcttgatcaaatccttaccgaatacaccatggcaacttcgcgcagccgcattagaccgcaaactgacgcctttagagtggtcggcagtcttattgcatttaatcaaacaccgcggttatttgtcgcaaagaaaaaacgagggcgaaactgccgataaagagcttggcgctttgctcaaaggcgtagccgacaatgcccatgccttacagacaggcgatttccgcacaccggccgaattggctttaaataaatttgagaaagaatgcggccatatccgcaaccaacgcggcgattattcgcatacgttcagccgcaaagatttgcaggcggagctgaatttactgtttgaaaaacaaaaagaattcggcaatccgcatgtttcaggcggccttaaagaaggtattgaaaccctactgatgacgcaacgccctgccctgtccggcgatgccgttcaaaaaatgttggggcattgcaccttcgaaccggcagagccgaaagccgctaaaaacacctacacagccgaacgtttcatctggctgaccaagctgaacaacctgcgtattttagagcaaggcagcgagcggccattgaccgataccgaacgcgccacgcttatggacgagccatacagaaaatccaaactgacttacgcacaagcccgtaagctgctgagtttagaagataccgcctttttcaaaggcttgcgctatggtaaagacaatgccgaagcctcaacattgatggaaatgaaggcctaccataccatcagccgtgcactggaaaaagaaggattgaaagacaaaaaatccccattaaacctttctcccgaattacaagacgaaatcggcacggcattctccctgttcaaaaccgatgaagacattacaggccgtctgaaagaccgtatacagcccgaaatcttagaagcgctgttgaaacacatcagcttcgataagttcgtccaaatttccttgaaagcattgcgccgaattgtgcctctaatggaacaaggcaaacgttacgatgaagcctgcgccgaaatctacggagaccattacggcaagaagaatacggaagaaaagatttatctgccgccgattcccgccgacgaaatccgcaaccccgtcgtcttgcgcgccttatctcaagcacgtaaggtcattaacggcgtggtacgccgttacggctccccagctcgtatccatattgaaactgcaagggaagtaggtaaatcgtttaaagaccgcaaagaaattgagaaacgccaagaagaaaaccgcaaagacagggaaaaagccgccgccaaattccgagagtatttccccaattttgtcggagaacccaaatccaaagatattctgaaactgcgcctgtacgagcaacaacacggcaaatgcctgtattcgggcaaagaaatcaacttaggccgtctgaacgaaaaaggctatgtcgaaatcgaccatgccctgccgttctcgcgcacatgggacgacagtttcaacaataaagtactggtattgggcagcgaaaaccaaaacaaaggcaatcaaaccccttacgaatacttcaacggcaaagacaacagccgcgaatggcaggaatttaaagcgcgtgtcgaaaccagccgtttcccgcgcagtaaaaaacaacggattctgctgcaaaaattcgatgaagacggctttaaagaacgcaatctgaacgacacgcgctacgtcaaccgtttcctgtgtcaatttgttgccgaccgtatgcggctgacaggtaaaggcaagaaacgtgtctttgcatccaacggacaaattaccaatctgttgcgcggcttttggggattgcgcaaagtgcgtgcggaaaacgaccgccatcacgccttggacgccgtcgtcgttgcctgctcgaccgttgccatgcagcagaaaattacccgttttgtacgctataaagagatgaacgcgtttgacggtaaaaccatagacaaagaaacaggagaagtgctgcatcaaaaaacacacttcccacaaccttgggaatttttcgcacaagaagtcatgattcgcgtcttcggcaaaccggacggcaaacccgaattcgaagaagccgataccccagaaaaactgcgcacgttgcttgccgaaaaattatcatctcgccccgaagccgtacacgaatacgttacgccactgtttgtttcacgcgcgcccaatcggaagatgagcgggcaagggcatatggagaccgtcaaatccgccaaacgactggacgaaggcgtcagcgtgttgcgcgtaccgttaacacagttaaaactgaaagacttggaaaaaatggtcaatcgggagcgcgaacctaagctatacgaagcactgaaagcacggctggaagcacataaagacgatcctgccaaagcctttgccgagccgttttacaaatacgataaagcaggcaaccgcacccaacaggtaaaagccgtacgcgtagagcaagtacagaaaaccggcgtatgggtgcgcaaccataacggtattgccgacaacgcaaccatggtgcgcgtagatgtgtttgagaaaggcgacaagtattatctggtaccgatttacagttggcaggtagcgaaagggattttgccggatagggctgttgttgcttatgcagatgaagaggactggactgtaatagatgaaagcttcagatttaaatttgtactttattcgaatgatttaattaaagttcaacttaaaaaagacagctttttaggttacttttcaggattagatcgagccactggagccatttctcttcgggagcatgatttggaaaaatcaaaaggtaaagacggtatgcatcgtatcggcgttaaaaccgccctttcctttcaaaaataccaaatcgacgaaatgggcaaagaaatcagaccatgccgtctgaaaaaacgcccgcctgtccgttaa

SEQ ID NO: 8 - RNA, 44 nt, synthetic construct
  source 1..44: mol_type = other RNA
  misc_difference 1: note = Any nucleotide
  misc_difference 2: note = Any nucleotide
  misc_difference 3: note = Any nucleotide
  misc_difference 4: note = Any nucleotide
  misc_difference 5: note = Any nucleotide
  misc_difference 6: note = Any nucleotide
  misc_difference 7: note = Any nucleotide
  misc_difference 8: note = Any nucleotide
  misc_difference 9: note = Any nucleotide
  misc_difference 10: note = Any nucleotide
  misc_difference 11: note = Any nucleotide
  misc_difference 12: note = Any nucleotide
  misc_difference 13: note = Any nucleotide
  misc_difference 14: note = Any nucleotide
  misc_difference 15: note = Any nucleotide
  misc_difference 16: note = Any nucleotide
  misc_difference 17: note = Any nucleotide
  misc_difference 18: note = Any nucleotide
  misc_difference 19: note = Any nucleotide
  misc_difference 20: note = Any nucleotide
  misc_difference 21: note = Any nucleotide
  misc_difference 22: note = Any nucleotide
  misc_difference 23: note = Any nucleotide
  misc_difference 24: note = Any nucleotide
  misc_difference 25: note = Any nucleotide
  misc_difference 26: note = Any nucleotide
  misc_difference 1..26: note = This region may encompass 18-26 nucleotides
nnnnnnnnnnnnnnnnnnnnnnnnnngttgtagctccctttctc

SEQ ID NO: 9 - RNA, 50 nt, synthetic construct
  source 1..50: mol_type = other RNA
  misc_difference 1: note = Any nucleotide
  misc_difference 2: note = Any nucleotide
  misc_difference 3: note = Any nucleotide
  misc_difference 4: note = Any nucleotide
  misc_difference 5: note = Any nucleotide
  misc_difference 6: note = Any nucleotide
  misc_difference 7: note = Any nucleotide
  misc_difference 8: note = Any nucleotide
  misc_difference 9: note = Any nucleotide
  misc_difference 10: note = Any nucleotide
  misc_difference 11: note = Any nucleotide
  misc_difference 12: note = Any nucleotide
  misc_difference 13: note = Any nucleotide
  misc_difference 14: note = Any nucleotide
  misc_difference 15: note = Any nucleotide
  misc_difference 16: note = Any nucleotide
  misc_difference 17: note = Any nucleotide
  misc_difference 18: note = Any nucleotide
  misc_difference 19: note = Any nucleotide
  misc_difference 20: note = Any nucleotide
  misc_difference 21: note = Any nucleotide
  misc_difference 22: note = Any nucleotide
  misc_difference 23: note = Any nucleotide
  misc_difference 24: note = Any nucleotide
  misc_difference 25: note = Any nucleotide
  misc_difference 26: note = Any nucleotide
  misc_difference 1..26: note = This region may encompass 18-26 nucleotides
nnnnnnnnnnnnnnnnnnnnnnnnnngttgtagctccctttctcatttcg

SEQ ID NO: 10 - RNA, 93 nt, synthetic construct
  source 1..93: mol_type = other RNA
cgaaatgagaaccgttgctacaataaggccgtctgaaaagatgtgccgcaacgctctgccccttaaagcttctgctttaaggggcatcgttta

SEQ ID NO: 11 - RNA, 86 nt, synthetic construct
  source 1..86: mol_type = other RNA
agaaccgttgctacaataaggccgtctgaaaagatgtgccgcaacgctctgccccttaaagctcctgctttaaggggcatcgttta

SEQ ID NO: 12 - RNA, 24 nt, synthetic construct
  source 1..24: mol_type = other RNA
ctgaacttgtggccgtttacgtcg

SEQ ID NO: 13 - RNA, 48 nt, synthetic construct
  source 1..48: mol_type = other RNA
  misc_difference 1: note = Any 2'-O-methyl nucleotide with a 3' phosphorothioate attached
  misc_difference 2: note = Any 2'-O-methyl nucleotide with a 3' phosphorothioate attached
  misc_difference 3: note = Any 2'-O-methyl nucleotide with a 3' phosphorothioate attached
  misc_difference 4: note = Any 2'-O-methyl nucleotide
  misc_difference 5: note = Any 2'-O-methyl nucleotide
  misc_difference 6: note = Any nucleotide
  misc_difference 7: note = Any nucleotide
  misc_difference 8: note = Any nucleotide
  misc_difference 9: note = Any nucleotide
  misc_difference 10: note = Any nucleotide
  misc_difference 11: note = Any nucleotide
  misc_difference 12: note = Any nucleotide
  misc_difference 13: note = Any nucleotide
  misc_difference 14: note = Any nucleotide
  misc_difference 15: note = Any nucleotide
  misc_difference 16: note = Any nucleotide
  misc_difference 17: note = Any nucleotide
  misc_difference 18: note = Any nucleotide
  misc_difference 19: note = Any nucleotide
  misc_difference 20: note = Any nucleotide
  misc_difference 21: note = Any nucleotide
  misc_difference 22: note = Any nucleotide
  misc_difference 23: note = Any nucleotide
  misc_difference 24: note = Any nucleotide
  modified_base 38: mod_base = OTHER; note = 2'-O-methyl uridine
  modified_base 39: mod_base = OTHER; note = 2'-O-methyl uridine
  modified_base 40: mod_base = OTHER; note = 2'-O-methyl cytidine
  modified_base 41: mod_base = OTHER; note = 2'-O-methyl uridine
  modified_base 42: mod_base = OTHER; note = 2'-O-methyl cytidine
  modified_base 43: mod_base = OTHER; note = 2'-O-methyl adenosine
  modified_base 44: mod_base = OTHER; note = 2'-O-methyl uridine
  modified_base 45: mod_base = OTHER; note = 2'-O-methyl uridine phosphorothioate
  modified_base 46: mod_base = OTHER; note = 2'-O-methyl uridine phosphorothioate
  modified_base 47: mod_base = OTHER; note = 2'-O-methyl cytidine phosphorothioate
  modified_base 48: mod_base = OTHER; note = 2'-O-methyl guanosine
nnnnnnnnnnnnnnnnnnnnnnnngttgtagctccctttctcatttcg

SEQ ID NO: 14 - DNA, 48 bp, synthetic construct
  source 1..48: mol_type = other DNA
  misc_difference 1: note = Any 2'-O-methyl nucleotide with a 3' phosphorothioate attached
  misc_difference 2: note = Any 2'-O-methyl nucleotide with a 3' phosphorothioate attached
  misc_difference 3: note = Any 2'-O-methyl nucleotide with a 3' phosphorothioate attached
  misc_difference 4: note = Any 2'-O-methyl nucleotide
  misc_difference 5: note = Any 2'-O-methyl nucleotide
  misc_difference 6: note = Any 2'-O-methyl nucleotide
  misc_difference 7: note = Any nucleotide with a 3' phosphorothioate attached
  misc_difference 8: note = Any 2'-O-methyl nucleotide
  misc_difference 9: note = Any 2'-O-methyl nucleotide
  misc_difference 10: note = Any 2'-O-methyl nucleotide
  misc_difference 11: note = Any 2'-O-methyl nucleotide
  misc_difference 12: note = Any 2'-fluoro nucleotide
  misc_difference 13: note = Any 2'-O-methyl nucleotide
  misc_difference 14: note = Any 2'-fluoro nucleotide
  misc_difference 15: note = Any 2'-O-methyl nucleotide
  misc_difference 16: note = Any 2'-fluoro nucleotide
  misc_difference 17: note = Any 2'-O-methyl nucleotide
  misc_difference 18: note = Any 2'-O-methyl nucleotide
  misc_difference 19: note = Any nucleotide
  misc_difference 20: note = Any nucleotide
  misc_difference 21: note = Any nucleotide
  misc_difference 22: note = Any 2'-O-methyl nucleotide
  misc_difference 23: note = Any nucleotide
  misc_difference 24: note = Any nucleotide
  modified_base 25: mod_base = OTHER; note = 2'-O-methyl guanosine
  modified_base 29: mod_base = OTHER; note = 2'-O-methyl uridine
  modified_base 30: mod_base = OTHER; note = 2'-O-methyl adenosine
  modified_base 31: mod_base = OTHER; note = 2'-O-methyl guanosine
  modified_base 32: mod_base = OTHER; note = 2'-O-methyl cytidine
  modified_base 38: mod_base = OTHER; note = 2'-O-methyl uridine
  modified_base 39: mod_base = OTHER; note = 2'-O-methyl uridine
  modified_base 40: mod_base = OTHER; note = 2'-O-methyl cytidine
  modified_base 41: mod_base = OTHER; note = 2'-O-methyl uridine
  modified_base 42: mod_base = OTHER; note = 2'-O-methyl cytidine
  modified_base 43: mod_base = OTHER; note = 2'-O-methyl adenosine
  modified_base 44: mod_base = OTHER; note = 2'-O-methyl uridine
  modified_base 45: mod_base = OTHER; note = 2'-O-methyl uridine phosphorothioate
  modified_base 46: mod_base = OTHER; note = 2'-O-methyl uridine phosphorothioate
  modified_base 47: mod_base = OTHER; note = 2'-O-methyl cytidine phosphorothioate
  modified_base 48: mod_base = OTHER; note = 2'-O-methyl guanosine
  misc_feature 1..6: note = RNA
  misc_feature 7: note = DNA
  misc_feature 8..48: note = RNA
nnnnnnnnnnnnnnnnnnnnnnnngttgtagctccctttctcatttcg

SEQ ID NO: 15 - DNA, 48 bp, synthetic construct; identical to SEQ ID NO: 14
  source 1..48: mol_type = other DNA
  misc_difference 1: note = Any 2'-O-methyl nucleotide with a 3' phosphorothioate attached
  misc_difference 2: note = Any 2'-O-methyl nucleotide with a 3' phosphorothioate attached
  misc_difference 3: note = Any 2'-O-methyl nucleotide with a 3' phosphorothioate attached
  misc_difference 4: note = Any 2'-O-methyl nucleotide
  misc_difference 5: note = Any 2'-O-methyl nucleotide
  misc_difference 6: note = Any 2'-O-methyl nucleotide
  misc_difference 7: note = Any nucleotide with a 3' phosphorothioate attached
  misc_difference 8: note = Any 2'-O-methyl nucleotide
  misc_difference 9: note = Any 2'-O-methyl nucleotide
  misc_difference 10: note = Any 2'-O-methyl nucleotide
  misc_difference 11: note = Any 2'-O-methyl nucleotide
  misc_difference 12: note = Any 2'-O-methyl nucleotide
  misc_difference 13: note = Any 2'-O-methyl nucleotide
  misc_difference 14: note = Any 2'-fluoro nucleotide
  misc_difference 15: note = Any 2'-O-methyl nucleotide
  misc_difference 16: note = Any 2'-fluoro nucleotide
  misc_difference 17: note = Any 2'-O-methyl nucleotide
  misc_difference 18: note = Any 2'-O-methyl nucleotide
  misc_difference 19: note = Any nucleotide
  misc_difference 20: note = Any nucleotide
  misc_difference 21: note = Any nucleotide
  misc_difference 22: note = Any 2'-O-methyl nucleotide
  misc_difference 23: note = Any nucleotide
  misc_difference 24: note = Any nucleotide
  modified_base 25: mod_base = OTHER; note = 2'-O-methyl guanosine
  modified_base 29: mod_base = OTHER; note = 2'-O-methyl uridine
  modified_base 30: mod_base = OTHER; note = 2'-O-methyl adenosine
  modified_base 31: mod_base = OTHER; note = 2'-O-methyl guanosine
  modified_base 32: mod_base = OTHER; note = 2'-O-methyl cytidine
  modified_base 38: mod_base = OTHER; note = 2'-O-methyl uridine
  modified_base 39: mod_base = OTHER; note = 2'-O-methyl uridine
  modified_base 40: mod_base = OTHER; note = 2'-O-methyl cytidine
  modified_base 41: mod_base = OTHER; note = 2'-O-methyl uridine
  modified_base 42: mod_base = OTHER; note = 2'-O-methyl cytidine
  modified_base 43: mod_base = OTHER; note = 2'-O-methyl adenosine
  modified_base 44: mod_base = OTHER; note = 2'-O-methyl uridine
  modified_base 45: mod_base = OTHER; note = 2'-O-methyl uridine phosphorothioate
  modified_base 46: mod_base = OTHER; note = 2'-O-methyl uridine phosphorothioate
  modified_base 47: mod_base = OTHER; note = 2'-O-methyl cytidine phosphorothioate
  modified_base 48: mod_base = OTHER; note = 2'-O-methyl guanosine
  misc_feature 1..6: note = RNA
  misc_feature 7: note = DNA
  misc_feature 8..48: note = RNA

SEQ ID NO: 16 - DNA, 48 bp, synthetic construct; identical to SEQ ID NO: 14
  source 1..48: mol_type = other DNA
  misc_difference 1: note = Any 2'-O-methyl nucleotide with a 3' phosphorothioate attached
  misc_difference 2: note = Any 2'-O-methyl nucleotide with a 3' phosphorothioate attached
  misc_difference 3: note = Any 2'-O-methyl nucleotide with a 3' phosphorothioate attached
  misc_difference 4: note = Any 2'-O-methyl nucleotide
  misc_difference 5: note = Any 2'-O-methyl nucleotide
  misc_difference 6: note = Any 2'-O-methyl nucleotide
  misc_difference 7: note = Any nucleotide with a 3' phosphorothioate attached
  misc_difference 8: note = Any 2'-O-methyl nucleotide
  misc_difference 9: note = Any 2'-O-methyl nucleotide
  misc_difference 10: note = Any 2'-O-methyl nucleotide
  misc_difference 11: note = Any 2'-O-methyl nucleotide
  misc_difference 12: note = Any 2'-fluoro nucleotide
  misc_difference 13: note = Any 2'-O-methyl nucleotide
  misc_difference 14: note = Any 2'-fluoro nucleotide
  misc_difference 15: note = Any 2'-O-methyl nucleotide
  misc_difference 16: note = Any 2'-fluoro nucleotide
  misc_difference 17: note = Any 2'-O-methyl nucleotide
  misc_difference 18: note = Any 2'-O-methyl nucleotide
  misc_difference 19: note = Any nucleotide
  misc_difference 20: note = Any 2'-fluoro nucleotide
  misc_difference 21: note = Any 2'-O-methyl nucleotide
  misc_difference 22: note = Any 2'-O-methyl nucleotide
  misc_difference 23: note = Any 2'-O-methyl nucleotide
  misc_difference 24: note = Any 2'-O-methyl nucleotide
  modified_base 25: mod_base = OTHER; note = 2'-O-methyl guanosine
  modified_base 29: mod_base = OTHER; note = 2'-O-methyl uridine
  modified_base 30: mod_base = OTHER; note = 2'-O-methyl adenosine
  modified_base 31: mod_base = OTHER; note = 2'-O-methyl guanosine
  modified_base 32: mod_base = OTHER; note = 2'-O-methyl cytidine
  modified_base 38: mod_base = OTHER; note = 2'-O-methyl uridine
  modified_base 39: mod_base = OTHER; note = 2'-O-methyl uridine
  modified_base 40: mod_base = OTHER; note = 2'-O-methyl cytidine
  modified_base 41: mod_base = OTHER; note = 2'-O-methyl uridine
  modified_base 42: mod_base = OTHER; note = 2'-O-methyl cytidine
  modified_base 43: mod_base = OTHER; note = 2'-O-methyl adenosine
  modified_base 44: mod_base = OTHER; note = 2'-O-methyl uridine
  modified_base 45: mod_base = OTHER; note = 2'-O-methyl uridine phosphorothioate
  modified_base 46: mod_base = OTHER; note = 2'-O-methyl uridine phosphorothioate
  modified_base 47: mod_base = OTHER; note = 2'-O-methyl cytidine phosphorothioate
  modified_base 48: mod_base = OTHER; note = 2'-O-methyl guanosine
  misc_feature 1..6: note = RNA
  misc_feature 7: note = DNA
  misc_feature 8..48: note = RNA

SEQ ID NO: 17 - DNA, 48 bp, synthetic construct; identical to SEQ ID NO: 14
  source 1..48: mol_type = other DNA
  misc_difference 1: note = Any 2'-O-methyl nucleotide with a 3' phosphorothioate attached
  misc_difference 2: note = Any 2'-O-methyl nucleotide with a 3' phosphorothioate attached
  misc_difference 3: note = Any 2'-O-methyl nucleotide with a 3' phosphorothioate attached
  misc_difference 4: note = Any 2'-O-methyl nucleotide
  misc_difference 5: note = Any 2'-O-methyl nucleotide
  misc_difference 6: note = Any 2'-O-methyl nucleotide
  misc_difference 7: note = Any nucleotide with a 3' phosphorothioate attached
  misc_difference 8: note = Any 2'-O-methyl nucleotide
  misc_difference 9: note = Any 2'-O-methyl nucleotide
  misc_difference 10: note = Any 2'-O-methyl nucleotide
  misc_difference 11: note = Any 2'-O-methyl nucleotide
  misc_difference 12: note = Any 2'-fluoro nucleotide
  misc_difference 13: note = Any 2'-O-methyl nucleotide
  misc_difference 14: note = Any 2'-fluoro nucleotide
  misc_difference 15: note = Any 2'-O-methyl nucleotide
  misc_difference 16: note = Any 2'-fluoro nucleotide
  misc_difference 17: note = Any 2'-O-methyl nucleotide
  misc_difference 18: note = Any 2'-O-methyl nucleotide
  misc_difference 19: note = Any nucleotide
  misc_difference 20: note = Any 2'-O-methyl nucleotide
  misc_difference 21: note = Any 2'-fluoro nucleotide
  misc_difference 22: note = Any 2'-O-methyl nucleotide
  misc_difference 23: note = Any 2'-O-methyl nucleotide
  misc_difference 24: note = Any 2'-O-methyl nucleotide
  modified_base 25: mod_base = OTHER; note = 2'-O-methyl guanosine
  modified_base 29: mod_base = OTHER; note = 2'-O-methyl uridine
  modified_base 30: mod_base = OTHER; note = 2'-O-methyl adenosine
  modified_base 31: mod_base = OTHER; note = 2'-O-methyl guanosine
  modified_base 32: mod_base = OTHER; note = 2'-O-methyl cytidine
  modified_base 38: mod_base = OTHER; note = 2'-O-methyl uridine
  modified_base 39: mod_base = OTHER; note = 2'-O-methyl uridine
  modified_base 40: mod_base = OTHER; note = 2'-O-methyl cytidine
  modified_base 41: mod_base = OTHER; note = 2'-O-methyl uridine
  modified_base 42: mod_base = OTHER; note = 2'-O-methyl cytidine
  modified_base 43: mod_base = OTHER; note = 2'-O-methyl adenosine
  modified_base 44: mod_base = OTHER; note = 2'-O-methyl uridine
  modified_base 45: mod_base = OTHER; note = 2'-O-methyl uridine phosphorothioate
  modified_base 46: mod_base = OTHER; note = 2'-O-methyl uridine phosphorothioate
  modified_base 47: mod_base = OTHER; note = 2'-O-methyl cytidine phosphorothioate
  modified_base 48: mod_base = OTHER; note = 2'-O-methyl guanosine
  misc_feature 1..6: note = RNA
  misc_feature 7: note = DNA
  misc_feature 8..48: note = RNA

SEQ ID NO: 18 - DNA, 48 bp, synthetic construct; identical to SEQ ID NO: 14
  source 1..48: mol_type = other DNA
  misc_difference 1: note = Any 2'-O-methyl nucleotide with a 3' phosphorothioate attached
  misc_difference 2: note = Any 2'-O-methyl nucleotide with a 3' phosphorothioate attached
  misc_difference 3: note = Any 2'-O-methyl nucleotide with a 3' phosphorothioate attached
  misc_difference 4: note = Any 2'-O-methyl nucleotide
  misc_difference 5: note = Any 2'-O-methyl nucleotide
  misc_difference 6: note = Any 2'-O-methyl nucleotide
  misc_difference 7: note = Any nucleotide with a 3' phosphorothioate attached
  misc_difference 8: note = Any 2'-O-methyl nucleotide
  misc_difference 9: note = Any 2'-O-methyl nucleotide
  misc_difference 10: note = Any 2'-O-methyl nucleotide
  misc_difference 11: note = Any 2'-O-methyl nucleotide
  misc_difference 12: note = Any 2'-O-methyl nucleotide
  misc_difference 13: note = Any 2'-O-methyl nucleotide
  misc_difference 14: note = Any 2'-fluoro nucleotide
  misc_difference 15: note = Any 2'-O-methyl nucleotide
  misc_difference 16: note = Any 2'-fluoro nucleotide
  misc_difference 17: note = Any 2'-O-methyl nucleotide
  misc_difference 18: note = Any 2'-O-methyl nucleotide
  misc_difference 19: note = Any nucleotide
  misc_difference 20: note = Any 2'-fluoro nucleotide
  misc_difference 21: note = Any 2'-O-methyl nucleotide
  misc_difference 22: note = Any 2'-O-methyl nucleotide
  misc_difference 23: note = Any 2'-O-methyl nucleotide
  misc_difference 24: note = Any 2'-O-methyl nucleotide
  modified_base 25: mod_base = OTHER; note = 2'-O-methyl guanosine
  modified_base 29: mod_base = OTHER; note = 2'-O-methyl uridine
  modified_base 30: mod_base = OTHER; note = 2'-O-methyl adenosine
  modified_base 31: mod_base = OTHER; note = 2'-O-methyl guanosine
  modified_base 32: mod_base = OTHER; note = 2'-O-methyl cytidine
  modified_base 38: mod_base = OTHER; note = 2'-O-methyl uridine
  modified_base 39: mod_base = OTHER; note = 2'-O-methyl uridine
  modified_base 40: mod_base = OTHER; note = 2'-O-methyl cytidine
  modified_base 41: mod_base = OTHER; note = 2'-O-methyl uridine
  modified_base 42: mod_base = OTHER; note = 2'-O-methyl cytidine
  modified_base 43: mod_base = OTHER; note = 2'-O-methyl adenosine
  modified_base 44: mod_base = OTHER; note = 2'-O-methyl uridine
  modified_base 45: mod_base = OTHER; note = 2'-O-methyl uridine phosphorothioate
  modified_base 46: mod_base = OTHER; note = 2'-O-methyl uridine phosphorothioate
  modified_base 47: mod_base = OTHER; note = 2'-O-methyl cytidine phosphorothioate
  modified_base 48: mod_base = OTHER; note = 2'-O-methyl guanosine
  misc_feature 1..6: note = RNA
  misc_feature 7: note = DNA
  misc_feature 8..48: note = RNA

SEQ ID NO: 19 - DNA, 48 bp, synthetic construct; identical to SEQ ID NO: 14
  source 1..48: mol_type = other DNA
  misc_difference 1: note = Any 2'-O-methyl nucleotide with a 3' phosphorothioate attached
  misc_difference 2: note = Any 2'-O-methyl nucleotide with a 3' phosphorothioate attached
  misc_difference 3: note = Any 2'-O-methyl nucleotide with a 3' phosphorothioate attached
  misc_difference 4: note = Any 2'-O-methyl nucleotide
  misc_difference 5: note = Any 2'-O-methyl nucleotide
  misc_difference 6: note = Any 2'-O-methyl nucleotide
  misc_difference 7: note = Any nucleotide with a 3' phosphorothioate attached
  misc_difference 8: note = Any 2'-O-methyl nucleotide
  misc_difference 9: note = Any 2'-O-methyl nucleotide
  misc_difference 10: note = Any 2'-O-methyl nucleotide
  misc_difference 11: note = Any 2'-O-methyl nucleotide
  misc_difference 12: note = Any 2'-O-methyl nucleotide
  misc_difference 13: note = Any 2'-O-methyl nucleotide
  misc_difference 14: note = Any 2'-fluoro nucleotide
  misc_difference 15: note = Any 2'-O-methyl nucleotide
  misc_difference 16: note = Any 2'-fluoro nucleotide
  misc_difference 17: note = Any 2'-O-methyl nucleotide
  misc_difference 18: note = Any 2'-O-methyl nucleotide
  misc_difference 19: note = Any nucleotide
  misc_difference 20: note = Any 2'-O-methyl nucleotide
  misc_difference 21: note = Any 2'-fluoro nucleotide
  misc_difference 22: note = Any 2'-O-methyl nucleotide
  misc_difference 23: note = Any 2'-O-methyl nucleotide
  misc_difference 24: note = Any 2'-O-methyl nucleotide
  modified_base 25: mod_base = OTHER; note = 2'-O-methyl guanosine
  modified_base 29: mod_base = OTHER; note = 2'-O-methyl uridine
  modified_base 30: mod_base = OTHER; note = 2'-O-methyl adenosine
  modified_base 31: mod_base = OTHER; note = 2'-O-methyl guanosine
  modified_base 32: mod_base = OTHER; note = 2'-O-methyl cytidine
  modified_base 38: mod_base = OTHER; note = 2'-O-methyl uridine
  modified_base 39: mod_base = OTHER; note = 2'-O-methyl uridine
  modified_base 40: mod_base = OTHER; note = 2'-O-methyl cytidine
  modified_base 41: mod_base = OTHER; note = 2'-O-methyl uridine
  modified_base 42: mod_base = OTHER; note = 2'-O-methyl cytidine
  modified_base 43: mod_base = OTHER; note = 2'-O-methyl adenosine
  modified_base 44: mod_base = OTHER; note = 2'-O-methyl uridine
  modified_base 45: mod_base = OTHER; note = 2'-O-methyl uridine phosphorothioate
  modified_base 46: mod_base = OTHER; note = 2'-O-methyl uridine phosphorothioate
  modified_base 47: mod_base = OTHER; note = 2'-O-methyl cytidine phosphorothioate
  modified_base 48: mod_base = OTHER; note = 2'-O-methyl guanosine
  misc_feature 1..6: note = RNA
  misc_feature 7: note = DNA
  misc_feature 8..48: note = RNA

SEQ ID NO: 20 - DNA, 48 bp, synthetic construct; identical to SEQ ID NO: 14
  source 1..48: mol_type = other DNA
  misc_difference 1: note = Any 2'-O-methyl nucleotide with a 3' phosphorothioate attached
  misc_difference 2: note = Any 2'-O-methyl nucleotide with a 3' phosphorothioate attached
  misc_difference 3: note = Any 2'-O-methyl nucleotide with a 3' phosphorothioate attached
  misc_difference 4: note = Any 2'-O-methyl nucleotide
  misc_difference 5: note = Any 2'-O-methyl nucleotide
  misc_difference 6: note = Any 2'-O-methyl nucleotide
  misc_difference 7: note = Any nucleotide with a 3' phosphorothioate attached
  misc_difference 8: note = Any 2'-O-methyl nucleotide
  misc_difference 9: note = Any 2'-O-methyl nucleotide
  misc_difference 10: note = Any 2'-O-methyl nucleotide
  misc_difference 11: note = Any 2'-O-methyl nucleotide
  misc_difference 12: note = Any 2'-fluoro nucleotide
  misc_difference 13: note = Any 2'-O-methyl nucleotide
  misc_difference 14: note = Any 2'-fluoro nucleotide
  misc_difference 15: note = Any 2'-O-methyl nucleotide
  misc_difference 16: note = Any 2'-fluoro nucleotide
  misc_difference 17: note = Any 2'-O-methyl nucleotide
  misc_difference 18: note = Any 2'-O-methyl nucleotide
  misc_difference 19: note = Any nucleotide with a 3' phosphorothioate attached
  misc_difference 20: note = Any 2'-fluoro nucleotide
  misc_difference 21: note = Any 2'-O-methyl nucleotide
  misc_difference 22: note = Any 2'-O-methyl nucleotide
  misc_difference 23: note = Any 2'-O-methyl nucleotide
  misc_difference 24: note = Any 2'-O-methyl nucleotide
  modified_base 25: mod_base = OTHER; note = 2'-O-methyl guanosine
  modified_base 29: mod_base = OTHER; note = 2'-O-methyl uridine
  modified_base 30: mod_base = OTHER; note = 2'-O-methyl adenosine
  modified_base 31: mod_base = OTHER; note = 2'-O-methyl guanosine
  modified_base 32: mod_base = OTHER; note = 2'-O-methyl cytidine
  modified_base 38: mod_base = OTHER; note = 2'-O-methyl uridine
  modified_base 39: mod_base = OTHER; note = 2'-O-methyl uridine
  modified_base 40: mod_base = OTHER; note = 2'-O-methyl cytidine
  modified_base 41: mod_base = OTHER; note = 2'-O-methyl uridine
  modified_base 42: mod_base = OTHER; note = 2'-O-methyl cytidine
  modified_base 43: mod_base = OTHER; note = 2'-O-methyl adenosine
  modified_base 44: mod_base = OTHER; note = 2'-O-methyl uridine
  modified_base 45: mod_base = OTHER; note = 2'-O-methyl uridine phosphorothioate
  modified_base 46: mod_base = OTHER; note = 2'-O-methyl uridine phosphorothioate
  modified_base 47: mod_base = OTHER; note = 2'-O-methyl cytidine phosphorothioate
  modified_base 48: mod_base = OTHER; note = 2'-O-methyl guanosine
  misc_feature 1..6: note = RNA
  misc_feature 7: note = DNA
  misc_feature 8..48: note = RNA

SEQ ID NO: 21 - DNA, 48 bp, synthetic construct; identical to SEQ ID NO: 14
  source 1..48: mol_type = other DNA
  misc_difference 1: note = Any 2'-O-methyl nucleotide with a 3' phosphorothioate attached
  misc_difference 2: note = Any 2'-O-methyl nucleotide with a 3' phosphorothioate attached
  misc_difference 3: note = Any 2'-O-methyl nucleotide with a 3' phosphorothioate attached
  misc_difference 4: note = Any 2'-O-methyl nucleotide
  misc_difference 5: note = Any 2'-O-methyl nucleotide
  misc_difference 6: note = Any 2'-O-methyl nucleotide
  misc_difference 7: note = Any nucleotide with a 3' phosphorothioate attached
  misc_difference 8: note = Any 2'-O-methyl nucleotide
  misc_difference 9: note = Any 2'-O-methyl nucleotide
  misc_difference 10: note = Any 2'-O-methyl nucleotide
  misc_difference 11: note = Any 2'-O-methyl nucleotide
  misc_difference 12: note = Any 2'-fluoro nucleotide
  misc_difference 13: note = Any 2'-O-methyl nucleotide
  misc_difference 14: note = Any 2'-fluoro nucleotide
  misc_difference 15: note = Any 2'-O-methyl nucleotide
  misc_difference 16: note = Any 2'-fluoro nucleotide
  misc_difference 17: note = Any 2'-O-methyl nucleotide
  misc_difference 18: note = Any 2'-O-methyl nucleotide
  misc_difference 19: note = Any nucleotide with a 3' phosphorothioate attached
  misc_difference 20: note = Any 2'-O-methyl nucleotide
  misc_difference 21: note = Any 2'-fluoro nucleotide
  misc_difference 22: note = Any 2'-O-methyl nucleotide
  misc_difference 23: note = Any 2'-O-methyl nucleotide
  misc_difference 24: note = Any 2'-O-methyl nucleotide
  modified_base 25: mod_base = OTHER; note = 2'-O-methyl guanosine
  modified_base 29: mod_base = OTHER; note = 2'-O-methyl uridine
  modified_base 30: mod_base = OTHER; note = 2'-O-methyl adenosine
  modified_base 31: mod_base = OTHER; note = 2'-O-methyl guanosine
  modified_base 32: mod_base = OTHER; note = 2'-O-methyl cytidine
  modified_base 38: mod_base = OTHER; note = 2'-O-methyl uridine
  modified_base 39: mod_base = OTHER; note = 2'-O-methyl uridine
  modified_base 40: mod_base = OTHER; note = 2'-O-methyl cytidine
  modified_base 41: mod_base = OTHER; note = 2'-O-methyl uridine
  modified_base 42: mod_base = OTHER; note = 2'-O-methyl cytidine
  modified_base 43: mod_base = OTHER; note = 2'-O-methyl adenosine
  modified_base 44: mod_base = OTHER; note = 2'-O-methyl uridine
  modified_base 45: mod_base = OTHER; note = 2'-O-methyl uridine phosphorothioate
  modified_base 46: mod_base = OTHER; note = 2'-O-methyl uridine phosphorothioate
  modified_base 47: mod_base = OTHER; note = 2'-O-methyl cytidine phosphorothioate
  modified_base 48: mod_base = OTHER; note = 2'-O-methyl guanosine
  misc_feature 1..6: note = RNA
  misc_feature 7: note = DNA
  misc_feature 8..48: note = RNA

SEQ ID NO: 22 - DNA, 48 bp, synthetic construct; identical to SEQ ID NO: 14
  source 1..48: mol_type = other DNA
  misc_difference 1: note = Any 2'-O-methyl nucleotide with a 3' phosphorothioate attached
  misc_difference 2: note = Any 2'-O-methyl nucleotide with a 3' phosphorothioate attached
  misc_difference 3: note = Any 2'-O-methyl nucleotide with a 3' phosphorothioate attached
  misc_difference 4: note = Any 2'-O-methyl nucleotide
  misc_difference 5: note = Any 2'-O-methyl nucleotide
  misc_difference 6: note = Any 2'-O-methyl nucleotide
  misc_difference 7: note = Any nucleotide with a 3' phosphorothioate attached
  misc_difference 8: note = Any 2'-O-methyl nucleotide
  misc_difference 9: note = Any 2'-O-methyl nucleotide
  misc_difference 10: note = Any 2'-O-methyl nucleotide
  misc_difference 11: note = Any 2'-O-methyl nucleotide
  misc_difference 12: note = Any 2'-O-methyl nucleotide
  misc_difference 13: note = Any 2'-O-methyl nucleotide
  misc_difference 14: note = Any 2'-fluoro nucleotide
  misc_difference 15: note = Any 2'-O-methyl nucleotide
  misc_difference 16: note = Any 2'-fluoro nucleotide
  misc_difference 17: note = Any 2'-O-methyl nucleotide
  misc_difference 18: note = Any 2'-O-methyl nucleotide
  misc_difference 19: note = Any nucleotide with a 3' phosphorothioate attached
  misc_difference 20: note = Any 2'-fluoro nucleotide
  misc_difference 21: note = Any 2'-O-methyl nucleotide
  misc_difference 22: note = Any 2'-O-methyl nucleotide
  misc_difference 23: note = Any 2'-O-methyl nucleotide
  misc_difference 24: note = Any 2'-O-methyl nucleotide
  modified_base 25: mod_base = OTHER; note = 2'-O-methyl guanosine
  modified_base 29: mod_base = OTHER; note = 2'-O-methyl uridine
  modified_base 30: mod_base = OTHER; note = 2'-O-methyl adenosine
  modified_base 31: mod_base = OTHER; note = 2'-O-methyl guanosine
  modified_base 32: mod_base = OTHER; note = 2'-O-methyl cytidine
  modified_base 38: mod_base = OTHER; note = 2'-O-methyl uridine
  modified_base 39: mod_base = OTHER; note = 2'-O-methyl uridine
  modified_base 40: mod_base = OTHER; note = 2'-O-methyl cytidine
  modified_base 41: mod_base = OTHER; note = 2'-O-methyl uridine
  modified_base 42: mod_base = OTHER; note = 2'-O-methyl cytidine
  modified_base 43: mod_base = OTHER; note = 2'-O-methyl adenosine
  modified_base 44: mod_base = OTHER; note = 2'-O-methyl uridine
  modified_base 45: mod_base = OTHER; note = 2'-O-methyl uridine phosphorothioate
  modified_base 46: mod_base = OTHER; note = 2'-O-methyl uridine phosphorothioate
  modified_base 47: mod_base = OTHER; note = 2'-O-methyl cytidine phosphorothioate
  modified_base 48: mod_base = OTHER; note = 2'-O-methyl guanosine
  misc_feature 1..6: note = RNA
  misc_feature 7: note = DNA
  misc_feature 8..48: note = RNA

SEQ ID NO: 23 - DNA, 48 bp, synthetic construct; identical to SEQ ID NO: 14
  source 1..48: mol_type = other DNA
  misc_difference 1: note = Any 2'-O-methyl nucleotide with a 3' phosphorothioate attached
  misc_difference 2: note = Any 2'-O-methyl nucleotide with a 3' phosphorothioate attached
  misc_difference 3: note = Any 2'-O-methyl nucleotide with a 3' phosphorothioate attached
  misc_difference 4: note = Any 2'-O-methyl nucleotide
  misc_difference 5: note = Any 2'-O-methyl nucleotide
  misc_difference 6: note = Any 2'-O-methyl nucleotide
  misc_difference 7: note = Any nucleotide with a 3' phosphorothioate attached
  misc_difference 8: note = Any 2'-O-methyl nucleotide
  misc_difference 9: note = Any 2'-O-methyl nucleotide
  misc_difference 10: note = Any 2'-O-methyl nucleotide
  misc_difference 11: note = Any 2'-O-methyl nucleotide
  misc_difference 12: note = Any 2'-O-methyl nucleotide
  misc_difference 13: note = Any 2'-O-methyl nucleotide
  misc_difference 14: note = Any 2'-fluoro nucleotide
  misc_difference 15: note = Any 2'-O-methyl nucleotide
  misc_difference 16: note = Any 2'-fluoro nucleotide
  misc_difference 17: note = Any 2'-O-methyl nucleotide
  misc_difference 18: note = Any 2'-O-methyl nucleotide
  misc_difference 19: note = Any nucleotide with a 3' phosphorothioate attached
  misc_difference 20: note = Any 2'-O-methyl nucleotide
  misc_difference 21: note = Any 2'-fluoro nucleotide
  misc_difference 22: note = Any 2'-O-methyl nucleotide
  misc_difference 23: note = Any 2'-O-methyl nucleotide
  misc_difference 24: note = Any 2'-O-methyl nucleotide
  modified_base 25: mod_base = OTHER; note = 2'-O-methyl guanosine
  modified_base 29: mod_base = OTHER; note = 2'-O-methyl uridine
  modified_base 30: mod_base = OTHER; note = 2'-O-methyl adenosine
  modified_base 31: mod_base = OTHER; note = 2'-O-methyl guanosine
  modified_base 32: mod_base = OTHER; note = 2'-O-methyl cytidine
  modified_base 38: mod_base = OTHER; note = 2'-O-methyl uridine
  modified_base 39: mod_base = OTHER; note = 2'-O-methyl uridine
  modified_base 40: mod_base = OTHER; note = 2'-O-methyl cytidine
  modified_base 41: mod_base = OTHER; note = 2'-O-methyl uridine
  modified_base 42: mod_base = OTHER; note = 2'-O-methyl cytidine
  modified_base 43: mod_base = OTHER; note = 2'-O-methyl adenosine
  modified_base 44: mod_base = OTHER; note = 2'-O-methyl uridine
  modified_base 45: mod_base = OTHER; note = 2'-O-methyl uridine phosphorothioate
  modified_base 46: mod_base = OTHER; note = 2'-O-methyl uridine phosphorothioate
  modified_base 47: mod_base = OTHER; note = 2'-O-methyl cytidine phosphorothioate
  modified_base 48: mod_base = OTHER; note = 2'-O-methyl guanosine
  misc_feature 1..6: note = RNA
  misc_feature 7: note = DNA
  misc_feature 8..48: note = RNA

SEQ ID NO: 24 - DNA, 48 bp, synthetic construct; identical to SEQ ID NO: 14
  source 1..48: mol_type = other DNA
  misc_difference 1: note = Any 2'-O-methyl nucleotide with a 3' phosphorothioate attached
  misc_difference 2: note = Any 2'-O-methyl nucleotide with a 3' phosphorothioate attached
  misc_difference 3: note = Any 2'-O-methyl nucleotide with a 3' phosphorothioate attached
  misc_difference 4: note = Any 2'-O-methyl nucleotide
  misc_difference 5: note = Any 2'-O-methyl nucleotide
  misc_difference 6: note = Any 2'-O-methyl nucleotide
  misc_difference 7: note = Any nucleotide with a 3' phosphorothioate attached
  misc_difference 8: note = Any 2'-O-methyl nucleotide
  misc_difference 9: note = Any 2'-O-methyl nucleotide
  misc_difference 10: note = Any 2'-O-methyl nucleotide
  misc_difference 11: note = Any 2'-O-methyl nucleotide
  misc_difference 12: note = Any 2'-fluoro nucleotide
  misc_difference 13: note = Any 2'-O-methyl nucleotide
  misc_difference 14: note = Any 2'-fluoro nucleotide
  misc_difference 15: note = Any 2'-O-methyl nucleotide
  misc_difference 16: note = Any 2'-fluoro nucleotide
  misc_difference 17: note = Any 2'-O-methyl nucleotide
  misc_difference 18: note = Any 2'-O-methyl nucleotide
  misc_difference 19: note = Any 2'-O-methyl nucleotide
  misc_difference 20: note = Any 2'-fluoro nucleotide
  misc_difference 21: note = Any 2'-O-methyl nucleotide
  misc_difference 22: note = Any 2'-O-methyl nucleotide
  misc_difference 23: note = Any 2'-O-methyl nucleotide
  misc_difference 24: note = Any 2'-O-methyl nucleotide
  modified_base 25: mod_base = OTHER; note = 2'-O-methyl guanosine
  modified_base 29: mod_base = OTHER; note = 2'-O-methyl uridine
  modified_base 30: mod_base = OTHER; note = 2'-O-methyl adenosine
  modified_base 31: mod_base = OTHER; note = 2'-O-methyl guanosine
  modified_base 32: mod_base = OTHER; note = 2'-O-methyl cytidine
  modified_base 38: mod_base = OTHER; note = 2'-O-methyl uridine
  modified_base 39: mod_base = OTHER; note = 2'-O-methyl uridine
  modified_base 40: mod_base = OTHER; note = 2'-O-methyl cytidine
  modified_base 41: mod_base = OTHER; note = 2'-O-methyl uridine
  modified_base 42: mod_base = OTHER; note = 2'-O-methyl cytidine
  modified_base 43: mod_base = OTHER; note = 2'-O-methyl adenosine
  modified_base 44: mod_base = OTHER; note = 2'-O-methyl uridine
  modified_base 45: mod_base = OTHER; note = 2'-O-methyl uridine phosphorothioate
  modified_base 46: mod_base = OTHER; note = 2'-O-methyl uridine phosphorothioate
  modified_base 47: mod_base = OTHER; note = 2'-O-methyl cytidine phosphorothioate
  modified_base 48: mod_base = OTHER; note = 2'-O-methyl guanosine
  misc_feature 1..6: note = RNA
  misc_feature 7: note = DNA
  misc_feature 8..48: note = RNA

SEQ ID NO: 25 - DNA, 48 bp, synthetic construct; identical to SEQ ID NO: 14
  source 1..48: mol_type = other DNA
  misc_difference 1: note = Any 2'-O-methyl nucleotide with a 3' phosphorothioate attached
  misc_difference 2: note = Any 2'-O-methyl nucleotide with a 3' phosphorothioate attached
  misc_difference 3: note = Any 2'-O-methyl nucleotide with a 3' phosphorothioate attached
  misc_difference 4: note = Any 2'-O-methyl nucleotide
  misc_difference 5: note = Any 2'-O-methyl nucleotide
  misc_difference 6: note = Any 2'-O-methyl nucleotide
  misc_difference 7: note = Any nucleotide with a 3' phosphorothioate attached
  misc_difference 8: note = Any 2'-O-methyl nucleotide
  misc_difference 9: note = Any 2'-O-methyl nucleotide
  misc_difference 10: note = Any 2'-O-methyl nucleotide
  misc_difference 11: note = Any 2'-O-methyl nucleotide
  misc_difference 12: note = Any 2'-fluoro nucleotide
  misc_difference 13: note = Any 2'-O-methyl nucleotide
  misc_difference 14: note = Any 2'-fluoro nucleotide
  misc_difference 15: note = Any 2'-O-methyl nucleotide
  misc_difference 16: note = Any 2'-fluoro nucleotide
  misc_difference 17: note = Any 2'-O-methyl nucleotide
  misc_difference 18: note = Any 2'-O-methyl nucleotide
  misc_difference 19: note = Any 2'-O-methyl nucleotide
  misc_difference 20: note = Any 2'-O-methyl nucleotide
  misc_difference 21: note = Any 2'-fluoro nucleotide
  misc_difference 22: note = Any 2'-O-methyl nucleotide
  misc_difference 23: note = Any 2'-O-methyl nucleotide
  misc_difference 24: note = Any 2'-O-methyl nucleotide
  modified_base 25: mod_base = OTHER; note = 2'-O-methyl guanosine
  modified_base 29: mod_base = OTHER; note = 2'-O-methyl uridine
  modified_base 30: mod_base = OTHER; note = 2'-O-methyl adenosine
  modified_base 31: mod_base = OTHER; note = 2'-O-methyl guanosine
  modified_base 32: mod_base = OTHER; note = 2'-O-methyl cytidine
  modified_base 38: mod_base = OTHER; note = 2'-O-methyl uridine
  modified_base 39: mod_base = OTHER; note = 2'-O-methyl uridine
  modified_base 40: mod_base = OTHER; note = 2'-O-methyl cytidine
  modified_base 41: mod_base = OTHER; note = 2'-O-methyl uridine
  modified_base 42: mod_base = OTHER; note = 2'-O-methyl cytidine
  modified_base 43: mod_base = OTHER; note = 2'-O-methyl adenosine
  modified_base 44: mod_base = OTHER; note = 2'-O-methyl uridine
  modified_base 45: mod_base = OTHER; note = 2'-O-methyl uridine phosphorothioate
  modified_base 46: mod_base = OTHER; note = 2'-O-methyl uridine phosphorothioate
  modified_base 47: mod_base = OTHER; note = 2'-O-methyl cytidine phosphorothioate
  modified_base 48: mod_base = OTHER; note = 2'-O-methyl guanosine
  misc_feature 1..6: note = RNA
  misc_feature 7: note = DNA
  misc_feature 8..48: note = RNA

SEQ ID NO: 26 - DNA, 48 bp, synthetic construct; identical to SEQ ID NO: 14
  source 1..48: mol_type = other DNA
  misc_difference 1: note = Any 2'-O-methyl nucleotide with a 3' phosphorothioate attached
  misc_difference 2: note = Any 2'-O-methyl nucleotide with a 3' phosphorothioate attached
  misc_difference 3: note = Any 2'-O-methyl nucleotide with a 3' phosphorothioate attached
  misc_difference 4: note = Any 2'-O-methyl nucleotide
  misc_difference 5: note = Any 2'-O-methyl nucleotide
  misc_difference 6: note = Any 2'-O-methyl nucleotide
  misc_difference 7: note = Any nucleotide with a 3' phosphorothioate attached
  misc_difference 8: note = Any 2'-O-methyl nucleotide
  misc_difference 9: note = Any 2'-O-methyl nucleotide
  misc_difference 10: note = Any 2'-O-methyl nucleotide
  misc_difference 11: note = Any 2'-O-methyl nucleotide
  misc_difference 12: note = Any 2'-O-methyl nucleotide
  misc_difference 13: note = Any 2'-O-methyl nucleotide
  misc_difference 14: note = Any 2'-fluoro nucleotide
  misc_difference 15: note = Any 2'-O-methyl nucleotide
  misc_difference 16: note = Any 2'-fluoro nucleotide
  misc_difference 17: note = Any 2'-O-methyl nucleotide
  misc_difference 18: note = Any 2'-O-methyl nucleotide
  misc_difference 19: note = Any 2'-O-methyl nucleotide
  misc_difference 20: note = Any 2'-fluoro nucleotide
  misc_difference 21: note = Any 2'-O-methyl nucleotide
  misc_difference 22: note = Any 2'-O-methyl nucleotide
  misc_difference 23: note = Any 2'-O-methyl nucleotide
  misc_difference 24: note = Any 2'-O-methyl nucleotide
  modified_base 25: mod_base = OTHER; note = 2'-O-methyl guanosine
  modified_base 29: mod_base = OTHER; note = 2'-O-methyl uridine
  modified_base 30: mod_base = OTHER; note = 2'-O-methyl adenosine
  modified_base 31: mod_base = OTHER; note = 2'-O-methyl guanosine
  modified_base 32: mod_base = OTHER; note = 2'-O-methyl cytidine
  modified_base 38: mod_base = OTHER; note = 2'-O-methyl uridine
  modified_base 39: mod_base = OTHER; note = 2'-O-methyl uridine
  modified_base 40: mod_base = OTHER; note = 2'-O-methyl cytidine
  modified_base 41: mod_base = OTHER; note = 2'-O-methyl uridine
  modified_base 42: mod_base = OTHER; note = 2'-O-methyl cytidine
  modified_base 43: mod_base = OTHER; note = 2'-O-methyl adenosine
  modified_base 44: mod_base = OTHER; note = 2'-O-methyl uridine
  modified_base 45: mod_base = OTHER; note = 2'-O-methyl uridine phosphorothioate
  modified_base 46: mod_base = OTHER; note = 2'-O-methyl uridine phosphorothioate
  modified_base 47: mod_base = OTHER; note = 2'-O-methyl cytidine phosphorothioate
  modified_base 48: mod_base = OTHER; note = 2'-O-methyl guanosine
  misc_feature 1..6: note = RNA
  misc_feature 7: note = DNA
  misc_feature 8..48: note = RNA

SEQ ID NO: 27 - DNA, 48 bp, synthetic construct; identical to SEQ ID NO: 14
  source 1..48: mol_type = other DNA
  misc_difference 1: note = Any 2'-O-methyl nucleotide with a 3' phosphorothioate attached
  misc_difference 2: note = Any 2'-O-methyl nucleotide with a 3' phosphorothioate attached
  misc_difference 3: note = Any 2'-O-methyl nucleotide with a 3' phosphorothioate attached
  misc_difference 4: note = Any 2'-O-methyl nucleotide
  misc_difference 5: note = Any 2'-O-methyl nucleotide
  misc_difference 6: note = Any 2'-O-methyl nucleotide
  misc_difference 7: note = Any nucleotide with a 3' phosphorothioate attached
  misc_difference 8: note = Any 2'-O-methyl nucleotide
  misc_difference 9: note = Any 2'-O-methyl nucleotide
  misc_difference 10: note = Any 2'-O-methyl nucleotide
  misc_difference 11: note = Any 2'-O-methyl nucleotide
  misc_difference 12: note = Any 2'-O-methyl nucleotide
  misc_difference 13: note = Any 2'-O-methyl nucleotide
  misc_difference 14: note = Any 2'-fluoro nucleotide
  misc_difference 15: note = Any 2'-O-methyl nucleotide
  misc_difference 16: note = Any 2'-fluoro nucleotide
  misc_difference 17: note = Any 2'-O-methyl nucleotide
  misc_difference 18: note = Any 2'-O-methyl nucleotide
  misc_difference 19: note = Any 2'-O-methyl nucleotide
  misc_difference 20: note = Any 2'-O-methyl nucleotide
  misc_difference 21: note = Any 2'-fluoro nucleotide
  misc_difference 22: note = Any 2'-O-methyl nucleotide
  misc_difference 23: note = Any 2'-O-methyl nucleotide
  misc_difference 24: note = Any 2'-O-methyl nucleotide
  modified_base 25: mod_base = OTHER; note = 2'-O-methyl guanosine
  modified_base 29: mod_base = OTHER; note = 2'-O-methyl uridine
  modified_base 30: mod_base = OTHER; note = 2'-O-methyl adenosine
  modified_base 31: mod_base = OTHER; note = 2'-O-methyl guanosine
  modified_base 32: mod_base = OTHER; note = 2'-O-methyl cytidine
  modified_base 38: mod_base = OTHER; note = 2'-O-methyl uridine
  modified_base 39: mod_base = OTHER; note = 2'-O-methyl uridine
  modified_base 40: mod_base = OTHER; note = 2'-O-methyl cytidine
  modified_base 41: mod_base = OTHER; note = 2'-O-methyl uridine
  modified_base 42: mod_base = OTHER; note = 2'-O-methyl cytidine
  modified_base 43: mod_base = OTHER; note = 2'-O-methyl adenosine
  modified_base 44: mod_base = OTHER; note = 2'-O-methyl uridine
  modified_base 45: mod_base = OTHER; note = 2'-O-methyl uridine phosphorothioate
  modified_base 46: mod_base = OTHER; note = 2'-O-methyl uridine phosphorothioate
  modified_base 47: mod_base = OTHER; note = 2'-O-methyl cytidine phosphorothioate
  modified_base 48: mod_base = OTHER; note = 2'-O-methyl guanosine
  misc_feature 1..6: note = RNA
  misc_feature 7: note = DNA
  misc_feature 8..48: note = RNA

SEQ ID NO: 28 - DNA, 48 bp, synthetic construct; identical to SEQ ID NO: 14
  source 1..48: mol_type = other DNA
  misc_difference 1: note = Any 2'-O-methyl nucleotide with a 3' phosphorothioate attached
  misc_difference 2: note = Any 2'-O-methyl nucleotide with a 3' phosphorothioate attached
  misc_difference 3: note = Any 2'-O-methyl nucleotide with a 3' phosphorothioate attached
  misc_difference 4: note = Any 2'-O-methyl nucleotide
  misc_difference 5: note = Any 2'-O-methyl nucleotide
  misc_difference 6: note = Any 2'-O-methyl nucleotide
  misc_difference 7: note = Any nucleotide with a 3' phosphorothioate attached
  misc_difference 8: note = Any 2'-O-methyl nucleotide
  misc_difference 9: note = Any 2'-O-methyl nucleotide
  misc_difference 10: note = Any 2'-O-methyl nucleotide
  misc_difference 11: note = Any 2'-O-methyl nucleotide
  misc_difference 12: note = Any 2'-fluoro nucleotide
  misc_difference 13: note = Any 2'-O-methyl nucleotide
  misc_difference 14: note = Any 2'-fluoro nucleotide
  misc_difference 15: note = Any 2'-O-methyl nucleotide
  misc_difference 16: note = Any 2'-fluoro nucleotide
  misc_difference 17: note = Any 2'-O-methyl nucleotide
  misc_difference 18: note = Any 2'-O-methyl nucleotide
  misc_difference 19: note = Any 2'-fluoro nucleotide
  misc_difference 20: note = Any 2'-fluoro nucleotide
  misc_difference 21: note = Any 2'-O-methyl nucleotide
  misc_difference 22: note = Any 2'-O-methyl nucleotide
  misc_difference 23: note = Any 2'-O-methyl nucleotide
  misc_difference 24: note = Any 2'-O-methyl nucleotide
  modified_base 25: mod_base = OTHER; note = 2'-O-methyl guanosine
  modified_base 29: mod_base = OTHER; note = 2'-O-methyl uridine
  modified_base 30: mod_base = OTHER; note = 2'-O-methyl adenosine
  modified_base 31: mod_base = OTHER; note = 2'-O-methyl guanosine
  modified_base 32: mod_base = OTHER; note = 2'-O-methyl cytidine
  modified_base 38: mod_base = OTHER; note = 2'-O-methyl uridine
  modified_base 39: mod_base = OTHER; note = 2'-O-methyl uridine
  modified_base 40: mod_base = OTHER; note = 2'-O-methyl cytidine
  modified_base 41: mod_base = OTHER; note = 2'-O-methyl uridine
  modified_base 42: mod_base = OTHER; note = 2'-O-methyl cytidine
  modified_base 43: mod_base = OTHER; note = 2'-O-methyl adenosine
  modified_base 44: mod_base = OTHER; note = 2'-O-methyl uridine
  modified_base 45: mod_base = OTHER; note = 2'-O-methyl uridine phosphorothioate
  modified_base 46: mod_base = OTHER; note = 2'-O-methyl uridine phosphorothioate
  modified_base 47: mod_base = OTHER; note = 2'-O-methyl cytidine phosphorothioate
  modified_base 48: mod_base = OTHER; note = 2'-O-methyl guanosine
  misc_feature 1..6: note = RNA
  misc_feature 7: note = DNA
  misc_feature 8..48: note = RNA

SEQ ID NO: 29 - DNA, 48 bp, synthetic construct; identical to SEQ ID NO: 14
  source 1..48: mol_type = other DNA
  misc_difference 1: note = Any 2'-O-methyl nucleotide with a 3' phosphorothioate attached
  misc_difference 2: note = Any 2'-O-methyl nucleotide with a 3' phosphorothioate attached
  misc_difference 3: note = Any 2'-O-methyl nucleotide with a 3' phosphorothioate attached
  misc_difference 4: note = Any 2'-O-methyl nucleotide
  misc_difference 5: note = Any 2'-O-methyl nucleotide
  misc_difference 6: note = Any 2'-O-methyl nucleotide
  misc_difference 7: note = Any nucleotide with a 3' phosphorothioate attached
  misc_difference 8: note = Any 2'-O-methyl nucleotide
  misc_difference 9: note = Any 2'-O-methyl nucleotide
  misc_difference 10: note = Any 2'-O-methyl nucleotide
  misc_difference 11: note = Any 2'-O-methyl nucleotide
  misc_difference 12: note = Any 2'-fluoro nucleotide
  misc_difference 13: note = Any 2'-O-methyl nucleotide
  misc_difference 14: note = Any 2'-fluoro nucleotide
  misc_difference 15: note = Any 2'-O-methyl nucleotide
  misc_difference 16: note = Any 2'-fluoro nucleotide
  misc_difference 17: note = Any 2'-O-methyl nucleotide
  misc_difference 18: note = Any 2'-O-methyl nucleotide
  misc_difference 19: note = Any 2'-fluoro nucleotide
  misc_difference 20: note = Any 2'-O-methyl nucleotide
  misc_difference 21: note = Any 2'-fluoro nucleotide
  misc_difference 22: note = Any 2'-O-methyl nucleotide
  misc_difference 23: note = Any 2'-O-methyl nucleotide
  misc_difference 24: note = Any 2'-O-methyl nucleotide
  modified_base 25: mod_base = OTHER; note = 2'-O-methyl guanosine
  modified_base 29: mod_base = OTHER; note = 2'-O-methyl uridine
  modified_base 30: mod_base = OTHER; note = 2'-O-methyl adenosine
  modified_base 31: mod_base = OTHER; note = 2'-O-methyl guanosine
  modified_base 32: mod_base = OTHER; note = 2'-O-methyl cytidine
  modified_base 38: mod_base = OTHER; note = 2'-O-methyl uridine
  modified_base 39: mod_base = OTHER; note = 2'-O-methyl uridine
  modified_base 40: mod_base = OTHER; note = 2'-O-methyl cytidine
  modified_base 41: mod_base = OTHER; note = 2'-O-methyl uridine
  modified_base 42: mod_base = OTHER; note = 2'-O-methyl cytidine
  modified_base 43: mod_base = OTHER; note = 2'-O-methyl adenosine
  modified_base 44: mod_base = OTHER; note = 2'-O-methyl uridine
  modified_base 45: mod_base = OTHER; note = 2'-O-methyl uridine phosphorothioate
  modified_base 46: mod_base = OTHER; note = 2'-O-methyl uridine phosphorothioate
  modified_base 47: mod_base = OTHER; note = 2'-O-methyl cytidine phosphorothioate
  modified_base 48: mod_base = OTHER; note = 2'-O-methyl guanosine
  misc_feature 1..6: note = RNA
  misc_feature 7: note = DNA
  misc_feature 8..48: note = RNA

SEQ ID NO: 30 - DNA, 48 bp, synthetic construct; identical to SEQ ID NO: 14
  source 1..48: mol_type = other DNA
  misc_difference 1: note = Any 2'-O-methyl nucleotide with a 3' phosphorothioate attached
  misc_difference 2: note = Any 2'-O-methyl nucleotide with a 3' phosphorothioate attached
  misc_difference 3: note = Any 2'-O-methyl nucleotide with a 3' phosphorothioate attached
  misc_difference 4: note = Any 2'-O-methyl nucleotide
  misc_difference 5: note = Any 2'-O-methyl nucleotide
  misc_difference 6: note = Any 2'-O-methyl nucleotide
  misc_difference 7: note = Any nucleotide with a 3' phosphorothioate attached
  misc_difference 8: note = Any 2'-O-methyl nucleotide
  misc_difference 9: note = Any 2'-O-methyl nucleotide
  misc_difference 10: note = Any 2'-O-methyl nucleotide
  misc_difference 11: note = Any 2'-O-methyl nucleotide
  misc_difference 12: note = Any 2'-O-methyl nucleotide
  misc_difference 13: note = Any 2'-O-methyl nucleotide
  misc_difference 14: note = Any 2'-fluoro nucleotide
  misc_difference 15: note = Any 2'-O-methyl nucleotide
  misc_difference 16: note = Any 2'-fluoro nucleotide
  misc_difference 17: note = Any 2'-O-methyl nucleotide
  misc_difference 18: note = Any 2'-O-methyl nucleotide
  misc_difference 19: note = Any 2'-fluoro nucleotide
  misc_difference 20: note = Any 2'-fluoro nucleotide
  misc_difference 21: note = Any 2'-O-methyl nucleotide
  misc_difference 22: note = Any 2'-O-methyl nucleotide
  misc_difference 23: note = Any 2'-O-methyl nucleotide
  misc_difference 24: note = Any 2'-O-methyl nucleotide
  modified_base 25: mod_base = OTHER; note = 2'-O-methyl guanosine
  modified_base 29: mod_base = OTHER; note = 2'-O-methyl uridine
  modified_base 30: mod_base = OTHER; note = 2'-O-methyl adenosine
  modified_base 31: mod_base = OTHER; note = 2'-O-methyl guanosine
  modified_base 32: mod_base = OTHER; note = 2'-O-methyl cytidine
  modified_base 38: mod_base = OTHER; note = 2'-O-methyl uridine
  modified_base 39: mod_base = OTHER; note = 2'-O-methyl uridine
  modified_base 40: mod_base = OTHER; note = 2'-O-methyl cytidine
  modified_base 41: mod_base = OTHER; note = 2'-O-methyl uridine
  modified_base 42: mod_base = OTHER; note = 2'-O-methyl cytidine
  modified_base 43: mod_base = OTHER; note = 2'-O-methyl adenosine
  modified_base 44: mod_base = OTHER; note = 2'-O-methyl uridine
  modified_base 45: mod_base = OTHER; note = 2'-O-methyl uridine phosphorothioate
  modified_base 46: mod_base = OTHER; note = 2'-O-methyl uridine phosphorothioate
  modified_base 47: mod_base = OTHER; note = 2'-O-methyl cytidine phosphorothioate
  modified_base 48: mod_base = OTHER; note = 2'-O-methyl guanosine
  misc_feature 1..6: note = RNA
  misc_feature 7: note = DNA
  misc_feature 8..48: note = RNA

SEQ ID NO: 31 - DNA, 48 bp, synthetic construct; identical to SEQ ID NO: 14
  source 1..48: mol_type = other DNA
  misc_difference 1: note = Any 2'-O-methyl nucleotide with a 3' phosphorothioate attached
  misc_difference 2: note = Any 2'-O-methyl nucleotide with a 3' phosphorothioate attached
  misc_difference 3: note = Any 2'-O-methyl nucleotide with a 3' phosphorothioate attached
  misc_difference 4: note = Any 2'-O-methyl nucleotide
  misc_difference 5: note = Any 2'-O-methyl nucleotide
  misc_difference 6: note = Any 2'-O-methyl nucleotide
  misc_difference 7: note = Any nucleotide with a 3' phosphorothioate attached
  misc_difference 8: note = Any 2'-O-methyl nucleotide
  misc_difference 9: note = Any 2'-O-methyl nucleotide
  misc_difference 10: note = Any 2'-O-methyl nucleotide
  misc_difference 11: note = Any 2'-O-methyl nucleotide
  misc_difference 12: note = Any 2'-O-methyl nucleotide
  misc_difference 13: note = Any 2'-O-methyl nucleotide
  misc_difference 14: note = Any 2'-fluoro nucleotide
  misc_difference 15: note = Any 2'-O-methyl nucleotide
  misc_difference 16: note = Any 2'-fluoro nucleotide
  misc_difference 17: note = Any 2'-O-methyl nucleotide
  misc_difference 18: note = Any 2'-O-methyl nucleotide
  misc_difference 19: note = Any 2'-fluoro nucleotide
  misc_difference 20: note = Any 2'-O-methyl nucleotide
  misc_difference 21: note = Any 2'-fluoro nucleotide
  misc_difference 22: note = Any 2'-O-methyl nucleotide
  misc_difference 23: note = Any 2'-O-methyl nucleotide
  misc_difference 24: note = Any 2'-O-methyl nucleotide
  modified_base 25: mod_base = OTHER; note = 2'-O-methyl guanosine
  modified_base 29: mod_base = OTHER; note = 2'-O-methyl uridine
  modified_base 30: mod_base = OTHER; note = 2'-O-methyl adenosine
  modified_base 31: mod_base = OTHER; note = 2'-O-methyl guanosine
  modified_base 32: mod_base = OTHER; note = 2'-O-methyl cytidine
  modified_base 38: mod_base = OTHER; note = 2'-O-methyl uridine
  modified_base 39: mod_base = OTHER; note = 2'-O-methyl uridine
  modified_base 40: mod_base = OTHER; note = 2'-O-methyl cytidine
  modified_base 41: mod_base = OTHER; note = 2'-O-methyl uridine
  modified_base 42: mod_base = OTHER; note = 2'-O-methyl cytidine
  modified_base 43: mod_base = OTHER; note = 2'-O-methyl adenosine
  modified_base 44: mod_base = OTHER; note = 2'-O-methyl uridine
  modified_base 45: mod_base = OTHER; note = 2'-O-methyl uridine phosphorothioate
  modified_base 46: mod_base = OTHER; note = 2'-O-methyl uridine phosphorothioate
  modified_base 47: mod_base = OTHER; note = 2'-O-methyl cytidine phosphorothioate
  modified_base 48: mod_base = OTHER; note = 2'-O-methyl guanosine
  misc_feature 1..6: note = RNA
  misc_feature 7: note = DNA
  misc_feature 8..48: note = RNA

SEQ ID NO: 32 - DNA, 48 bp, synthetic construct; identical to SEQ ID NO: 14
  source 1..48: mol_type = other DNA
  misc_difference 1: note = Any 2'-O-methyl nucleotide with a 3' phosphorothioate attached
  misc_difference 2: note = Any 2'-O-methyl nucleotide with a 3' phosphorothioate attached
  misc_difference 3: note = Any 2'-O-methyl nucleotide with a 3' phosphorothioate attached
  misc_difference 4: note = Any 2'-O-methyl nucleotide
  misc_difference 5: note = Any 2'-O-methyl nucleotide
  misc_difference 6: note = Any 2'-O-methyl nucleotide
  misc_difference 7: note = Any nucleotide with a 3' phosphorothioate attached
  misc_difference 8: note = Any 2'-O-methyl nucleotide
  misc_difference 9: note = Any 2'-O-methyl nucleotide
  misc_difference 10: note = Any 2'-O-methyl nucleotide
  misc_difference 11: note = Any 2'-O-methyl nucleotide
  misc_difference 12: note = Any 2'-O-methyl nucleotide
  misc_difference 13: note = Any 2'-O-methyl nucleotide
  misc_difference 14: note = Any 2'-fluoro nucleotide
  misc_difference 15: note = Any 2'-O-methyl nucleotide
  misc_difference 16: note = Any 2'-fluoro nucleotide
  misc_difference 17: note = Any 2'-O-methyl nucleotide
  misc_difference 18: note = Any 2'-O-methyl nucleotide
  misc_difference 19: note = Any nucleotide
  misc_difference 20: note = Any nucleotide
  misc_difference 21: note = Any nucleotide
  misc_difference 22: note = Any 2'-O-methyl nucleotide
  misc_difference 23: note = Any nucleotide
  misc_difference 24: note = Any nucleotide
  modified_base 25: mod_base = OTHER; note = 2'-O-methyl guanosine
  modified_base 26: mod_base = OTHER; note = Deoxythymidine phosphorothioate
  modified_base 28: mod_base = OTHER; note = 2'-O-methyl guanosine
  modified_base 29: mod_base = OTHER; note = 2'-O-methyl uridine
  modified_base 30: mod_base = OTHER; note = 2'-O-methyl adenosine
  modified_base 31: mod_base = OTHER; note = 2'-O-methyl guanosine
  modified_base 32: mod_base = OTHER; note = 2'-O-methyl cytidine
  modified_base 38: mod_base = OTHER; note = 2'-O-methyl uridine
  modified_base 39: mod_base = OTHER; note = 2'-O-methyl uridine
  modified_base 40: mod_base = OTHER; note = 2'-O-methyl cytidine
  modified_base 41: mod_base = OTHER; note = 2'-O-methyl uridine
  modified_base 42: mod_base = OTHER; note = 2'-O-methyl cytidine
  modified_base 43: mod_base = OTHER; note = 2'-O-methyl adenosine
  modified_base 44: mod_base = OTHER; note = 2'-O-methyl uridine
  modified_base 45: mod_base = OTHER; note = 2'-O-methyl uridine phosphorothioate
  modified_base 46: mod_base = OTHER; note = 2'-O-methyl uridine phosphorothioate
  modified_base 47: mod_base = OTHER; note = 2'-O-methyl cytidine phosphorothioate
  modified_base 48: mod_base = OTHER; note = 2'-O-methyl guanosine
  misc_feature 1..6: note = RNA
  misc_feature 7: note = DNA
  misc_feature 8..25: note = RNA
  misc_feature 26: note = DNA
  misc_feature 27..48: note = RNA

SEQ ID NO: 33 - DNA, 48 bp, synthetic construct; identical to SEQ ID NO: 14
  source 1..48: mol_type = other DNA
  misc_difference 1: note = Any 2'-O-methyl nucleotide with a 3' phosphorothioate attached
  misc_difference 2: note = Any 2'-O-methyl nucleotide with a 3' phosphorothioate attached
  misc_difference 3: note = Any 2'-O-methyl nucleotide with a 3' phosphorothioate attached
  misc_difference 4: note = Any 2'-O-methyl nucleotide
  misc_difference 5: note = Any 2'-O-methyl nucleotide
  misc_difference 6: note = Any 2'-O-methyl nucleotide
  misc_difference 7: note = Any nucleotide with a 3' phosphorothioate attached
  misc_difference 8: note = Any 2'-O-methyl nucleotide
  misc_difference 9: note = Any 2'-O-methyl nucleotide
  misc_difference 10: note = Any 2'-O-methyl nucleotide
  misc_difference 11: note = Any 2'-O-methyl nucleotide
  misc_difference 12: note = Any 2'-O-methyl nucleotide
  misc_difference 13: note = Any 2'-O-methyl nucleotide
  misc_difference 14: note = Any 2'-fluoro nucleotide
  misc_difference 15: note = Any 2'-O-methyl nucleotide
  misc_difference 16: note = Any 2'-fluoro nucleotide
  misc_difference 17: note = Any 2'-O-methyl nucleotide
  misc_difference 18: note = Any 2'-O-methyl nucleotide
  misc_difference 19: note = Any nucleotide
  misc_difference 20: note = Any nucleotide
  misc_difference 21: note = Any nucleotide
  misc_difference 22: note = Any 2'-O-methyl nucleotide
  misc_difference 23: note = Any nucleotide
  misc_difference 24: note = Any nucleotide
  modified_base 25: mod_base = OTHER; note = 2'-O-methyl guanosine
  modified_base 26: mod_base = OTHER; note = Deoxythymidine phosphorothioate
  modified_base 28: mod_base = OTHER; note = 2'-O-methyl guanosine
  modified_base 29: mod_base = OTHER; note = 2'-O-methyl uridine
  modified_base 30: mod_base = OTHER; note = 2'-O-methyl adenosine
  modified_base 31: mod_base = OTHER; note = 2'-O-methyl guanosine
  modified_base 32: mod_base = OTHER; note = 2'-O-methyl cytidine
  modified_base 35: mod_base = OTHER; note = 2'-O-methyl cytidine
  modified_base 38: mod_base = OTHER; note = 2'-O-methyl uridine
  modified_base 39: mod_base = OTHER; note = 2'-O-methyl uridine
  modified_base 40: mod_base = OTHER; note = 2'-O-methyl cytidine
  modified_base 41: mod_base = OTHER; note = 2'-O-methyl uridine
  modified_base 42: mod_base = OTHER; note = 2'-O-methyl cytidine
  modified_base 43: mod_base = OTHER; note = 2'-O-methyl adenosine
  modified_base 44: mod_base = OTHER; note = 2'-O-methyl uridine
  modified_base 45: mod_base = OTHER; note = 2'-O-methyl uridine phosphorothioate
  modified_base 46: mod_base = OTHER; note = 2'-O-methyl uridine phosphorothioate
  modified_base 47: mod_base = OTHER; note = 2'-O-methyl cytidine phosphorothioate
  modified_base 48: mod_base = OTHER; note = 2'-O-methyl guanosine
  misc_feature 1..6: note = RNA
  misc_feature 7: note = DNA
  misc_feature 8..25: note = RNA
  misc_feature 26: note = DNA
  misc_feature 27..48: note = RNA

SEQ ID NO: 34 - DNA, 48 bp, synthetic construct; identical to SEQ ID NO: 14
  source 1..48: mol_type = other DNA
  misc_difference 1: note = Any 2'-O-methyl nucleotide with a 3' phosphorothioate attached
  misc_difference 2: note = Any 2'-O-methyl nucleotide with a 3' phosphorothioate attached
  misc_difference 3: note = Any 2'-O-methyl nucleotide with a 3' phosphorothioate attached
  misc_difference 4: note = Any 2'-O-methyl nucleotide
  misc_difference 5: note = Any 2'-O-methyl nucleotide
  misc_difference 6: note = Any 2'-O-methyl nucleotide
  misc_difference 7: note = Any nucleotide with a 3' phosphorothioate attached
  misc_difference 8: note = Any 2'-O-methyl nucleotide
  misc_difference 9: note = Any 2'-O-methyl nucleotide
  misc_difference 10: note = Any 2'-O-methyl nucleotide
  misc_difference 11: note = Any 2'-O-methyl nucleotide
  misc_difference 12: note = Any 2'-O-methyl nucleotide
  misc_difference 13: note = Any 2'-O-methyl nucleotide
  misc_difference 14: note = Any 2'-fluoro nucleotide
  misc_difference 15: note = Any 2'-O-methyl nucleotide
  misc_difference 16: note = Any 2'-fluoro nucleotide
  misc_difference 17: note = Any 2'-O-methyl nucleotide
  misc_difference 18: note = Any 2'-O-methyl nucleotide
  misc_difference 19: note = Any nucleotide
  misc_difference 20: note = Any nucleotide
  misc_difference 21: note = Any nucleotide
  misc_difference 22: note = Any 2'-O-methyl nucleotide
  misc_difference 23: note = Any nucleotide
  misc_difference 24: note = Any nucleotide
  modified_base 25: mod_base = OTHER; note = 2'-O-methyl guanosine
  modified_base 26: mod_base = OTHER; note = Deoxythymidine phosphorothioate
  modified_base 28: mod_base = OTHER; note = 2'-O-methyl guanosine
  modified_base 29: mod_base = OTHER; note = 2'-O-methyl uridine
  modified_base 30: mod_base = OTHER; note = 2'-O-methyl adenosine
  modified_base 31: mod_base = OTHER; note = 2'-O-methyl guanosine
  modified_base 32: mod_base = OTHER; note = 2'-O-methyl cytidine
  modified_base 36: mod_base = OTHER; note = 2'-O-methyl cytidine
  modified_base 38: mod_base = OTHER; note = 2'-O-methyl uridine
  modified_base 39: mod_base = OTHER; note = 2'-O-methyl uridine
  modified_base 40: mod_base = OTHER; note = 2'-O-methyl cytidine
  modified_base 41: mod_base = OTHER; note = 2'-O-methyl uridine
  modified_base 42: mod_base = OTHER; note = 2'-O-methyl cytidine
  modified_base 43: mod_base = OTHER; note = 2'-O-methyl adenosine
  modified_base 44: mod_base = OTHER; note = 2'-O-methyl uridine
  modified_base 45: mod_base = OTHER; note = 2'-O-methyl uridine phosphorothioate
  modified_base 46: mod_base = OTHER; note = 2'-O-methyl uridine phosphorothioate
  modified_base 47: mod_base = OTHER; note = 2'-O-methyl cytidine phosphorothioate
  modified_base 48: mod_base = OTHER; note = 2'-O-methyl guanosine
  misc_feature 1..6: note = RNA
  misc_feature 7: note = DNA
  misc_feature 8..25: note = RNA
  misc_feature 26: note = DNA
  misc_feature 27..48: note = RNA

SEQ ID NO: 35 - DNA, 48 bp, synthetic construct; identical to SEQ ID NO: 14
  source 1..48: mol_type = other DNA
  misc_difference 1: note = Any 2'-O-methyl nucleotide with a 3' phosphorothioate attached
  misc_difference 2: note = Any 2'-O-methyl nucleotide with a 3' phosphorothioate attached
  misc_difference 3: note = Any 2'-O-methyl nucleotide with a 3' phosphorothioate attached
  misc_difference 4: note = Any 2'-O-methyl nucleotide
  misc_difference 5: note = Any 2'-O-methyl nucleotide
  misc_difference 6: note = Any 2'-O-methyl nucleotide
  misc_difference 7: note = Any nucleotide with a 3' phosphorothioate attached
  misc_difference 8: note = Any 2'-O-methyl nucleotide
  misc_difference 9: note = Any 2'-O-methyl nucleotide
  misc_difference 10: note = Any 2'-O-methyl nucleotide
  misc_difference 11: note = Any 2'-O-methyl nucleotide
  misc_difference 12: note = Any 2'-O-methyl nucleotide
  misc_difference 13: note = Any 2'-O-methyl nucleotide
  misc_difference 14: note = Any 2'-fluoro nucleotide
  misc_difference 15: note = Any 2'-O-methyl nucleotide
  misc_difference 16: note = Any 2'-fluoro nucleotide
  misc_difference 17: note = Any 2'-O-methyl nucleotide
  misc_difference 18: note = Any 2'-O-methyl nucleotide
  misc_difference 19: note = Any nucleotide
  misc_difference 20: note = Any nucleotide
  misc_difference 21: note = Any nucleotide
  misc_difference 22: note = Any 2'-O-methyl nucleotide
  misc_difference 23: note = Any nucleotide
  misc_difference 24: note = Any nucleotide
  modified_base 25: mod_base = OTHER; note = 2'-O-methyl guanosine
  modified_base 26: mod_base = OTHER; note = Deoxythymidine phosphorothioate
  modified_base 28: mod_base = OTHER; note = 2'-O-methyl guanosine
  modified_base 29: mod_base = OTHER; note = 2'-O-methyl uridine
  modified_base 30: mod_base = OTHER; note = 2'-O-methyl adenosine
  modified_base 31: mod_base = OTHER; note = 2'-O-methyl guanosine
  modified_base 32: mod_base = OTHER; note = 2'-O-methyl cytidine
  modified_base 35: mod_base = OTHER; note = 2'-O-methyl cytidine
  modified_base 36: mod_base = OTHER; note = 2'-O-methyl cytidine
  modified_base 38: mod_base = OTHER; note = 2'-O-methyl uridine
  modified_base 39: mod_base = OTHER; note = 2'-O-methyl uridine
  modified_base 40: mod_base = OTHER; note = 2'-O-methyl cytidine
  modified_base 41: mod_base = OTHER; note = 2'-O-methyl uridine
  modified_base 42: mod_base = OTHER; note = 2'-O-methyl cytidine
  modified_base 43: mod_base = OTHER; note = 2'-O-methyl adenosine
  modified_base 44: mod_base = OTHER; note = 2'-O-methyl uridine
  modified_base 45: mod_base = OTHER; note = 2'-O-methyl uridine phosphorothioate
  modified_base 46: mod_base = OTHER; note = 2'-O-methyl uridine phosphorothioate
  modified_base 47: mod_base = OTHER; note = 2'-O-methyl cytidine phosphorothioate
  modified_base 48: mod_base = OTHER; note = 2'-O-methyl guanosine
  misc_feature 1..6: note = RNA
  misc_feature 7: note = DNA
  misc_feature 8..25: note = RNA
  misc_feature 26: note = DNA
  misc_feature 27..48: note = RNA

SEQ ID NO: 36 - DNA, 48 bp, synthetic construct; identical to SEQ ID NO: 14
  source 1..48: mol_type = other DNA
  misc_difference 1: note = Any 2'-O-methyl nucleotide with a 3' phosphorothioate attached
  misc_difference 2: note = Any 2'-O-methyl nucleotide with a 3' phosphorothioate attached
  misc_difference 3: note = Any 2'-O-methyl nucleotide with a 3' phosphorothioate attached
  misc_difference 4: note = Any 2'-O-methyl nucleotide
  misc_difference 5: note = Any 2'-O-methyl nucleotide
  misc_difference 6: note = Any 2'-O-methyl nucleotide
  misc_difference 7: note = Any nucleotide with a 3' phosphorothioate attached
  misc_difference 8: note = Any 2'-O-methyl nucleotide
  misc_difference 9: note = Any 2'-O-methyl nucleotide
  misc_difference 10: note = Any 2'-O-methyl nucleotide
  misc_difference 11: note = Any 2'-O-methyl nucleotide
  misc_difference 12: note = Any 2'-O-methyl nucleotide
  misc_difference 13: note = Any 2'-O-methyl nucleotide
  misc_difference 14: note = Any 2'-fluoro nucleotide
  misc_difference 15: note = Any 2'-O-methyl nucleotide
  misc_difference 16: note = Any 2'-fluoro nucleotide
  misc_difference 17: note = Any 2'-O-methyl nucleotide
  misc_difference 18: note = Any 2'-O-methyl nucleotide
  misc_difference 19: note = Any nucleotide
  misc_difference 20: note = Any nucleotide
  misc_difference 21: note = Any nucleotide
  misc_difference 22: note = Any 2'-O-methyl nucleotide
  misc_difference 23: note = Any nucleotide
  misc_difference 24: note = Any nucleotide
  modified_base 25: mod_base = OTHER; note = 2'-O-methyl guanosine
  modified_base 29: mod_base = OTHER; note = 2'-O-methyl uridine
  modified_base 30: mod_base = OTHER; note = 2'-O-methyl adenosine
  modified_base 31: mod_base = OTHER; note = 2'-O-methyl guanosine
  modified_base 32: mod_base = OTHER; note = 2'-O-methyl cytidine
  modified_base 33: mod_base = OTHER; note = Deoxythymidine phosphorothioate
  modified_base 38: mod_base = OTHER; note = 2'-O-methyl uridine
  modified_base 39: mod_base = OTHER; note = 2'-O-methyl uridine
  modified_base 40: mod_base = OTHER; note = 2'-O-methyl cytidine
  modified_base 41: mod_base = OTHER; note = 2'-O-methyl uridine
  modified_base 42: mod_base = OTHER; note = 2'-O-methyl cytidine
  modified_base 43: mod_base = OTHER; note = 2'-O-methyl adenosine
  modified_base 44: mod_base = OTHER; note = 2'-O-methyl uridine
  modified_base 45: mod_base = OTHER; note = 2'-O-methyl uridine phosphorothioate
  modified_base 46: mod_base = OTHER; note = 2'-O-methyl uridine phosphorothioate
  modified_base 47: mod_base = OTHER; note = 2'-O-methyl cytidine phosphorothioate
  modified_base 48: mod_base = OTHER; note = 2'-O-methyl guanosine
  misc_feature 1..6: note = RNA
  misc_feature 7: note = DNA
  misc_feature 8..32: note = RNA
  misc_feature 33: note = DNA
  misc_feature 34..48: note = RNA

SEQ ID NO: 37 - DNA, 48 bp, synthetic construct; identical to SEQ ID NO: 14
  source 1..48: mol_type = other DNA
  misc_difference 1: note = Any 2'-O-methyl nucleotide with a 3' phosphorothioate attached
  misc_difference 2: note = Any 2'-O-methyl nucleotide with a 3' phosphorothioate attached
  misc_difference 3: note = Any 2'-O-methyl nucleotide with a 3' phosphorothioate attached
  misc_difference 4: note = Any 2'-O-methyl nucleotide
  misc_difference 5: note = Any 2'-O-methyl nucleotide
  misc_difference 6: note = Any 2'-O-methyl nucleotide
  misc_difference 7: note = Any nucleotide with a 3' phosphorothioate attached
  misc_difference 8: note = Any 2'-O-methyl nucleotide
  misc_difference 9: note = Any 2'-O-methyl nucleotide
  misc_difference 10: note = Any 2'-O-methyl nucleotide
  misc_difference 11: note = Any 2'-O-methyl nucleotide
  misc_difference 12: note = Any 2'-O-methyl nucleotide
  misc_difference 13: note = Any 2'-O-methyl nucleotide
  misc_difference 14: note = Any 2'-fluoro nucleotide
  misc_difference 15: note = Any 2'-O-methyl nucleotide
  misc_difference 16: note = Any 2'-fluoro nucleotide
  misc_difference 17: note = Any 2'-O-methyl nucleotide
  misc_difference 18: note = Any 2'-O-methyl nucleotide
  misc_difference 19: note = Any nucleotide
  misc_difference 20: note = Any nucleotide
  misc_difference 21: note = Any nucleotide
  misc_difference 22: note = Any 2'-O-methyl nucleotide
  misc_difference 23: note = Any nucleotide
  misc_difference 24: note = Any nucleotide
  modified_base 25: mod_base = OTHER; note = 2'-O-methyl guanosine
  modified_base 29: mod_base = OTHER; note = 2'-O-methyl uridine
  modified_base 30: mod_base = OTHER; note = 2'-O-methyl adenosine
  modified_base 31: mod_base = OTHER; note = 2'-O-methyl guanosine
  modified_base 32: mod_base = OTHER; note = 2'-O-methyl cytidine
  modified_base 34: mod_base = OTHER; note = Deoxycytidine phosphorothioate
  modified_base 38: mod_base = OTHER; note = 2'-O-methyl uridine
  modified_base 39: mod_base = OTHER; note = 2'-O-methyl uridine
  modified_base 40: mod_base = OTHER; note = 2'-O-methyl cytidine
  modified_base 41: mod_base = OTHER; note = 2'-O-methyl uridine
  modified_base 42: mod_base = OTHER; note = 2'-O-methyl cytidine
  modified_base 43: mod_base = OTHER; note = 2'-O-methyl adenosine
  modified_base 44: mod_base = OTHER; note = 2'-O-methyl uridine
  modified_base 45: mod_base = OTHER; note = 2'-O-methyl uridine phosphorothioate
  modified_base 46: mod_base = OTHER; note = 2'-O-methyl uridine phosphorothioate
  modified_base 47: mod_base = OTHER; note = 2'-O-methyl cytidine phosphorothioate
  modified_base 48: mod_base = OTHER; note = 2'-O-methyl guanosine
  misc_feature 1..6: note = RNA
  misc_feature 7: note = DNA
  misc_feature 8..33: note = RNA
  misc_feature 34: note = DNA
  misc_feature 35..48: note = RNA

SEQ ID NO: 38 - DNA, 48 bp, synthetic construct; identical to SEQ ID NO: 14
  source 1..48: mol_type = other DNA
  misc_difference 1: note = Any 2'-O-methyl nucleotide with a 3' phosphorothioate attached
  misc_difference 2: note = Any 2'-O-methyl nucleotide with a 3' phosphorothioate attached
  misc_difference 3: note = Any 2'-O-methyl nucleotide with a 3' phosphorothioate attached
  misc_difference 4: note = Any 2'-O-methyl nucleotide
  misc_difference 5: note = Any 2'-O-methyl nucleotide
  misc_difference 6: note = Any 2'-O-methyl nucleotide
  misc_difference 7: note = Any nucleotide with a 3' phosphorothioate attached
  misc_difference 8: note = Any 2'-O-methyl nucleotide
  misc_difference 9: note = Any 2'-O-methyl nucleotide
  misc_difference 10: note = Any 2'-O-methyl nucleotide
  misc_difference 11: note = Any 2'-O-methyl nucleotide
  misc_difference 12: note = Any 2'-O-methyl nucleotide
  misc_difference 13: note = Any 2'-O-methyl nucleotide
  misc_difference 14: note = Any 2'-fluoro nucleotide
  misc_difference 15: note = Any 2'-O-methyl nucleotide
  misc_difference 16: note = Any 2'-fluoro nucleotide
  misc_difference 17: note = Any 2'-O-methyl nucleotide
  misc_difference 18: note = Any 2'-O-methyl nucleotide
  misc_difference 19: note = Any nucleotide
  misc_difference 20: note = Any nucleotide
  misc_difference 21: note = Any nucleotide
  misc_difference 22: note = Any 2'-O-methyl nucleotide
  misc_difference 23: note = Any nucleotide
  misc_difference 24: note = Any nucleotide
  modified_base 25: mod_base = OTHER; note = 2'-O-methyl guanosine
  modified_base 29: mod_base = OTHER; note = 2'-O-methyl uridine
  modified_base 30: mod_base = OTHER; note = 2'-O-methyl adenosine
  modified_base 31: mod_base = OTHER; note = 2'-O-methyl guanosine
  modified_base 32: mod_base = OTHER; note = 2'-O-methyl cytidine
  modified_base 35: mod_base = OTHER; note = Deoxycytidine phosphorothioate
  modified_base 38: mod_base = OTHER; note = 2'-O-methyl uridine
  modified_base 39: mod_base = OTHER; note = 2'-O-methyl uridine
  modified_base 40: mod_base = OTHER; note = 2'-O-methyl cytidine
  modified_base 41: mod_base = OTHER; note = 2'-O-methyl uridine
  modified_base 42: mod_base = OTHER; note = 2'-O-methyl cytidine
  modified_base 43: mod_base = OTHER; note = 2'-O-methyl adenosine
  modified_base 44: mod_base = OTHER; note = 2'-O-methyl uridine
  modified_base 45: mod_base = OTHER; note = 2'-O-methyl uridine phosphorothioate
  modified_base 46: mod_base = OTHER; note = 2'-O-methyl uridine phosphorothioate
  modified_base 47: mod_base = OTHER; note = 2'-O-methyl cytidine phosphorothioate
  modified_base 48: mod_base = OTHER; note = 2'-O-methyl guanosine
  misc_feature 1..6: note = RNA
  misc_feature 7: note = DNA
  misc_feature 8..34: note = RNA
  misc_feature 35: note = DNA
  misc_feature 36..48: note = RNA

SEQ ID NO: 39 - DNA, 48 bp, synthetic construct; identical to SEQ ID NO: 14
  source 1..48: mol_type = other DNA
  misc_difference 1: note = Any 2'-O-methyl nucleotide with a 3' phosphorothioate attached
  misc_difference 2: note = Any 2'-O-methyl nucleotide with a 3' phosphorothioate attached
  misc_difference 3: note = Any 2'-O-methyl nucleotide with a 3' phosphorothioate attached
  misc_difference 4: note = Any 2'-O-methyl nucleotide
  misc_difference 5: note = Any 2'-O-methyl nucleotide
  misc_difference 6: note = Any 2'-O-methyl nucleotide
  misc_difference 7: note = Any nucleotide with a 3' phosphorothioate attached
  misc_difference 8: note = Any 2'-O-methyl nucleotide
  misc_difference 9: note = Any 2'-O-methyl nucleotide
  misc_difference 10: note = Any 2'-O-methyl nucleotide
  misc_difference 11: note = Any 2'-O-methyl nucleotide
  misc_difference 12: note = Any 2'-O-methyl nucleotide
  misc_difference 13: note = Any 2'-O-methyl nucleotide
  misc_difference 14: note = Any 2'-fluoro nucleotide
  misc_difference 15: note = Any 2'-O-methyl nucleotide
  misc_difference 16: note = Any 2'-fluoro nucleotide
  misc_difference 17: note = Any 2'-O-methyl nucleotide
  misc_difference 18: note = Any 2'-O-methyl nucleotide
  misc_difference 19: note = Any nucleotide
  misc_difference 20: note = Any nucleotide
  misc_difference 21: note = Any nucleotide
  misc_difference 22: note = Any 2'-O-methyl nucleotide
  misc_difference 23: note = Any nucleotide
  misc_difference 24: note = Any nucleotide
  modified_base 25: mod_base = OTHER; note = 2'-O-methyl guanosine
  modified_base 29: mod_base = OTHER; note = 2'-O-methyl uridine
  modified_base 30: mod_base = OTHER; note = 2'-O-methyl adenosine
  modified_base 31: mod_base = OTHER; note = 2'-O-methyl guanosine
  modified_base 32: mod_base = OTHER; note = 2'-O-methyl cytidine
  modified_base 36: mod_base = OTHER; note = Deoxycytidine phosphorothioate
  modified_base 38: mod_base = OTHER; note = 2'-O-methyl uridine
  modified_base 39: mod_base = OTHER; note = 2'-O-methyl uridine
  modified_base 40: mod_base = OTHER; note = 2'-O-methyl cytidine
  modified_base 41: mod_base = OTHER; note = 2'-O-methyl uridine
  modified_base 42: mod_base = OTHER; note = 2'-O-methyl cytidine
  modified_base 43: mod_base = OTHER; note = 2'-O-methyl adenosine
  modified_base 44: mod_base = OTHER; note = 2'-O-methyl uridine
  modified_base 45: mod_base = OTHER; note = 2'-O-methyl uridine phosphorothioate
  modified_base 46: mod_base = OTHER; note = 2'-O-methyl uridine phosphorothioate
  modified_base 47: mod_base = OTHER; note = 2'-O-methyl cytidine phosphorothioate
  modified_base 48: mod_base = OTHER; note = 2'-O-methyl guanosine
  misc_feature 1..6: note = RNA
  misc_feature 7: note = DNA
  misc_feature 8..35: note = RNA
  misc_feature 36: note = DNA
  misc_feature 37..48: note = RNA

SEQ ID NO: 40 - DNA, 48 bp, synthetic construct; identical to SEQ ID NO: 14
  source 1..48: mol_type = other DNA
  misc_difference 1: note = Any 2'-O-methyl nucleotide with a 3' phosphorothioate attached
  misc_difference 2: note = Any 2'-O-methyl nucleotide with a 3' phosphorothioate attached
  misc_difference 3: note = Any 2'-O-methyl nucleotide with a 3' phosphorothioate attached
  misc_difference 4: note = Any 2'-O-methyl nucleotide
  misc_difference 5: note = Any 2'-O-methyl nucleotide
  misc_difference 6: note = Any 2'-O-methyl nucleotide
  misc_difference 7: note = Any nucleotide with a 3' phosphorothioate attached
  misc_difference 8: note = Any 2'-O-methyl nucleotide
  misc_difference 9: note = Any 2'-O-methyl nucleotide
  misc_difference 10: note = Any 2'-O-methyl nucleotide
  misc_difference 11: note = Any 2'-O-methyl nucleotide
  misc_difference 12: note = Any 2'-O-methyl nucleotide
  misc_difference 13: note = Any 2'-O-methyl nucleotide
  misc_difference 14: note = Any 2'-fluoro nucleotide
  misc_difference 15: note = Any 2'-O-methyl nucleotide
  misc_difference 16: note = Any 2'-fluoro nucleotide
  misc_difference 17: note = Any 2'-O-methyl nucleotide
  misc_difference 18: note = Any 2'-O-methyl nucleotide
  misc_difference 19: note = Any nucleotide
  misc_difference 20: note = Any nucleotide
  misc_difference 21: note = Any nucleotide
  misc_difference 22: note = Any 2'-O-methyl nucleotide
  misc_difference 23: note = Any nucleotide
  misc_difference 24: note = Any nucleotide
  modified_base 25: mod_base = OTHER; note = 2'-O-methyl guanosine
  modified_base 29: mod_base = OTHER; note = 2'-O-methyl uridine
  modified_base 30: mod_base = OTHER; note = 2'-O-methyl adenosine
  modified_base 31: mod_base = OTHER; note = 2'-O-methyl guanosine
  modified_base 32: mod_base = OTHER; note = 2'-O-methyl cytidine
  modified_base 37: mod_base = OTHER; note = Deoxythymidine phosphorothioate
  modified_base 38: mod_base = OTHER; note = 2'-O-methyl uridine
  modified_base 39: mod_base = OTHER; note = 2'-O-methyl uridine
  modified_base 40: mod_base = OTHER; note = 2'-O-methyl cytidine
  modified_base 41: mod_base = OTHER; note = 2'-O-methyl uridine
  modified_base 42: mod_base = OTHER; note = 2'-O-methyl cytidine
  modified_base 43: mod_base = OTHER; note = 2'-O-methyl adenosine
  modified_base 44: mod_base = OTHER; note = 2'-O-methyl uridine
  modified_base 45: mod_base = OTHER; note = 2'-O-methyl uridine phosphorothioate
  modified_base 46: mod_base = OTHER; note = 2'-O-methyl uridine phosphorothioate
  modified_base 47: mod_base = OTHER; note = 2'-O-methyl cytidine phosphorothioate
  modified_base 48: mod_base = OTHER; note = 2'-O-methyl guanosine
  misc_feature 1..6: note = RNA
  misc_feature 7: note = DNA
  misc_feature 8..36: note = RNA
  misc_feature 37: note = DNA
  misc_feature 38..48: note = RNA

SEQ ID NO: 41 - DNA, 48 bp, synthetic construct; identical to SEQ ID NO: 14
  source 1..48: mol_type = other DNA
  misc_difference 1: note = Any 2'-O-methyl nucleotide with a 3' phosphorothioate attached
  misc_difference 2: note = Any 2'-O-methyl nucleotide with a 3' phosphorothioate attached
  misc_difference 3: note = Any 2'-O-methyl nucleotide with a 3' phosphorothioate attached
  misc_difference 4: note = Any 2'-O-methyl nucleotide
  misc_difference 5: note = Any 2'-O-methyl nucleotide
  misc_difference 6: note = Any 2'-O-methyl nucleotide
  misc_difference 7: note = Any nucleotide with a 3' phosphorothioate attached
  misc_difference 8: note = Any 2'-O-methyl nucleotide
  misc_difference 9: note = Any 2'-O-methyl nucleotide
  misc_difference 10: note = Any 2'-O-methyl nucleotide
  misc_difference 11: note = Any 2'-O-methyl nucleotide
  misc_difference 12: note = Any 2'-O-methyl nucleotide
  misc_difference 13: note = Any 2'-O-methyl nucleotide
  misc_difference 14: note = Any 2'-fluoro nucleotide
  misc_difference 15: note = Any 2'-O-methyl nucleotide
  misc_difference 16: note = Any 2'-fluoro nucleotide
  misc_difference 17: note = Any 2'-O-methyl nucleotide
  misc_difference 18: note = Any 2'-O-methyl nucleotide
  misc_difference 19: note = Any nucleotide
  misc_difference 20: note = Any nucleotide
  misc_difference 21: note = Any nucleotide
  misc_difference 22: note = Any 2'-O-methyl nucleotide
  misc_difference 23: note = Any nucleotide
  misc_difference 24: note = Any nucleotide
  modified_base 25: mod_base = OTHER; note = 2'-O-methyl guanosine
  modified_base 29: mod_base = OTHER; note = 2'-O-methyl uridine
  modified_base 30: mod_base = OTHER; note = 2'-O-methyl adenosine
  modified_base 31: mod_base = OTHER; note = 2'-O-methyl guanosine
  modified_base 32: mod_base = OTHER; note = 2'-O-methyl cytidine
  modified_base 33: mod_base = OTHER; note = Deoxythymidine phosphorothioate
  modified_base 35: mod_base = OTHER; note = Deoxycytidine phosphorothioate
  modified_base 37: mod_base = OTHER; note = Deoxythymidine phosphorothioate
  modified_base 38: mod_base = OTHER; note = 2'-O-methyl uridine
  modified_base 39: mod_base = OTHER; note = 2'-O-methyl uridine
  modified_base 40: mod_base = OTHER; note = 2'-O-methyl cytidine
  modified_base 41: mod_base = OTHER; note = 2'-O-methyl uridine
  modified_base 42: mod_base = OTHER; note = 2'-O-methyl cytidine
  modified_base 43: mod_base = OTHER; note = 2'-O-methyl adenosine
  modified_base 44: mod_base = OTHER; note = 2'-O-methyl uridine
  modified_base 45: mod_base = OTHER; note = 2'-O-methyl uridine phosphorothioate
  modified_base 46: mod_base = OTHER; note = 2'-O-methyl uridine phosphorothioate
  modified_base 47: mod_base = OTHER; note = 2'-O-methyl cytidine phosphorothioate
  modified_base 48: mod_base = OTHER; note = 2'-O-methyl guanosine
  misc_feature 1..6: note = RNA
  misc_feature 7: note = DNA
  misc_feature 8..32: note = RNA
  misc_feature 33: note = DNA
  misc_feature 34: note = RNA
  misc_feature 35: note = DNA
  misc_feature 36: note = RNA
  misc_feature 37: note = DNA
  misc_feature 38..48: note = RNA

SEQ ID NO: 42 - DNA, 48 bp, synthetic construct; identical to SEQ ID NO: 14
  source 1..48: mol_type = other DNA
  misc_difference 1: note = Any 2'-O-methyl nucleotide with a 3' phosphorothioate attached
  misc_difference 2: note = Any 2'-O-methyl nucleotide with a 3' phosphorothioate attached
  misc_difference 3: note = Any 2'-O-methyl nucleotide with a 3' phosphorothioate attached
  misc_difference 4: note = Any 2'-O-methyl nucleotide
  misc_difference 5: note = Any 2'-O-methyl nucleotide
  misc_difference 6: note = Any 2'-O-methyl nucleotide
  misc_difference 7: note = Any nucleotide with a 3' phosphorothioate attached
  misc_difference 8: note = Any 2'-O-methyl nucleotide
  misc_difference 9: note = Any 2'-O-methyl nucleotide
  misc_difference 10: note = Any 2'-O-methyl nucleotide
  misc_difference 11: note = Any 2'-O-methyl nucleotide
  misc_difference 12: note = Any 2'-O-methyl nucleotide
  misc_difference 13: note = Any 2'-O-methyl nucleotide
  misc_difference 14: note = Any 2'-fluoro nucleotide
  misc_difference 15: note = Any 2'-O-methyl nucleotide
  misc_difference 16: note = Any 2'-fluoro nucleotide
  misc_difference 17: note = Any 2'-O-methyl nucleotide
  misc_difference 18: note = Any 2'-O-methyl nucleotide
  misc_difference 19: note = Any nucleotide
  misc_difference 20: note = Any nucleotide
  misc_difference 21: note = Any nucleotide
  misc_difference 22: note = Any 2'-O-methyl nucleotide
  misc_difference 23: note = Any nucleotide
  misc_difference 24: note = Any nucleotide
  modified_base 25: mod_base = OTHER; note = 2'-O-methyl guanosine
  modified_base 26: mod_base = OTHER; note = Deoxythymidine phosphorothioate
  modified_base 29: mod_base = OTHER; note = 2'-O-methyl uridine
  modified_base 30: mod_base = OTHER; note = 2'-O-methyl adenosine
  modified_base 31: mod_base = OTHER; note = 2'-O-methyl guanosine
  modified_base 32: mod_base = OTHER; note = 2'-O-methyl cytidine
  modified_base 33: mod_base = OTHER; note = Deoxythymidine phosphorothioate
  modified_base 34: mod_base = OTHER; note = Deoxycytidine phosphorothioate
  modified_base 35: mod_base = OTHER; note = Deoxycytidine phosphorothioate
  modified_base 37: mod_base = OTHER; note = Deoxythymidine phosphorothioate
  modified_base 38: mod_base = OTHER; note = 2'-O-methyl uridine
  modified_base 39: mod_base = OTHER; note = 2'-O-methyl uridine
  modified_base 40: mod_base = OTHER; note = 2'-O-methyl cytidine
  modified_base 41: mod_base = OTHER; note = 2'-O-methyl uridine
  modified_base 42: mod_base = OTHER; note = 2'-O-methyl cytidine
  modified_base 43: mod_base = OTHER; note = 2'-O-methyl adenosine
  modified_base 44: mod_base = OTHER; note = 2'-O-methyl uridine
  modified_base 45: mod_base = OTHER; note = 2'-O-methyl uridine phosphorothioate
  modified_base 46: mod_base = OTHER; note = 2'-O-methyl uridine phosphorothioate
  modified_base 47: mod_base = OTHER; note = 2'-O-methyl cytidine phosphorothioate
  modified_base 48: mod_base = OTHER; note = 2'-O-methyl guanosine
  misc_feature 1..6: note = RNA
  misc_feature 7: note = DNA
  misc_feature 8..25: note = RNA
  misc_feature 26: note = DNA
  misc_feature 27..32: note = RNA
  misc_feature 33..35: note = DNA
  misc_feature 36: note = RNA
  misc_feature 37: note = DNA
  misc_feature 38..48: note = RNA

SEQ ID NO: 43 - DNA, 48 bp, synthetic construct; identical to SEQ ID NO: 14
  source 1..48: mol_type = other DNA
  misc_difference 1: note = Any 2'-O-methyl nucleotide with a 3' phosphorothioate attached
  misc_difference 2: note = Any 2'-O-methyl nucleotide with a 3' phosphorothioate attached
  misc_difference 3: note = Any 2'-O-methyl nucleotide with a 3' phosphorothioate attached
  misc_difference 4: note = Any 2'-O-methyl nucleotide
  misc_difference 5: note = Any 2'-O-methyl nucleotide
  misc_difference 6: note = Any 2'-O-methyl nucleotide
  misc_difference 7: note = Any nucleotide with a 3' phosphorothioate attached
  misc_difference 8: note = Any 2'-O-methyl nucleotide
  misc_difference 9: note = Any 2'-O-methyl nucleotide
  misc_difference 10: note = Any 2'-O-methyl nucleotide
  misc_difference 11: note = Any 2'-O-methyl nucleotide
  misc_difference 12: note = Any 2'-O-methyl nucleotide
  misc_difference 13: note = Any 2'-O-methyl nucleotide
  misc_difference 14: note = Any 2'-fluoro nucleotide
  misc_difference 15: note = Any 2'-O-methyl nucleotide
  misc_difference 16: note = Any 2'-fluoro nucleotide
  misc_difference 17: note = Any 2'-O-methyl nucleotide
  misc_difference 18: note = Any 2'-O-methyl nucleotide
  misc_difference 19: note = Any nucleotide
  misc_difference 20: note = Any nucleotide
  misc_difference 21: note = Any nucleotide
  misc_difference 22: note = Any 2'-O-methyl nucleotide
  misc_difference 23: note = Any nucleotide
  misc_difference 24: note = Any nucleotide
  modified_base 25: mod_base = OTHER; note = 2'-O-methyl guanosine
  modified_base 26: mod_base = OTHER; note = Deoxythymidine phosphorothioate
  modified_base 28: mod_base = OTHER; note = 2'-O-methyl guanosine
  modified_base 29: mod_base = OTHER; note = 2'-O-methyl uridine
  modified_base 30: mod_base = OTHER; note = 2'-O-methyl adenosine
  modified_base 31: mod_base = OTHER; note = 2'-O-methyl guanosine
  modified_base 32: mod_base = OTHER; note = 2'-O-methyl cytidine
  modified_base 33: mod_base = OTHER; note = Deoxythymidine phosphorothioate
  modified_base 35: mod_base = OTHER; note = 2'-O-methyl cytidine
  modified_base 37: mod_base = OTHER; note = Deoxythymidine phosphorothioate
  modified_base 38: mod_base = OTHER; note = 2'-O-methyl uridine
  modified_base 39: mod_base = OTHER; note = 2'-O-methyl uridine
  modified_base 40: mod_base = OTHER; note = 2'-O-methyl cytidine
  modified_base 41: mod_base = OTHER; note = 2'-O-methyl uridine
  modified_base 42: mod_base = OTHER; note = 2'-O-methyl cytidine
  modified_base 43: mod_base = OTHER; note = 2'-O-methyl adenosine
  modified_base 44: mod_base = OTHER; note = 2'-O-methyl uridine
  modified_base 45: mod_base = OTHER; note = 2'-O-methyl uridine phosphorothioate
  modified_base 46: mod_base = OTHER; note = 2'-O-methyl uridine phosphorothioate
  modified_base 47: mod_base = OTHER; note = 2'-O-methyl cytidine phosphorothioate
  modified_base 48: mod_base = OTHER; note = 2'-O-methyl guanosine
  misc_feature 1..6: note = RNA
  misc_feature 7: note = DNA
  misc_feature 8..25: note = RNA
  misc_feature 26: note = DNA
  misc_feature 27..32: note = RNA
  misc_feature 33: note = DNA
  misc_feature 34..36: note = RNA
  misc_feature 37: note = DNA
  misc_feature 38..48: note = RNA

SEQ ID NO: 44 - DNA, 48 bp, synthetic construct; identical to SEQ ID NO: 14
  source 1..48: mol_type = other DNA
  misc_difference 1: note = Any 2'-O-methyl nucleotide with a 3' phosphorothioate attached
  misc_difference 2: note = Any 2'-O-methyl nucleotide with a 3' phosphorothioate attached
  misc_difference 3: note = Any 2'-O-methyl nucleotide with a 3' phosphorothioate attached
  misc_difference 4: note = Any 2'-O-methyl nucleotide
  misc_difference 5: note = Any 2'-O-methyl nucleotide
  misc_difference 6: note = Any 2'-O-methyl nucleotide
  misc_difference 7: note = Any nucleotide with a 3' phosphorothioate attached
  misc_difference 8: note = Any 2'-O-methyl nucleotide
  misc_difference 9: note = Any 2'-O-methyl nucleotide
  misc_difference 10: note = Any 2'-O-methyl nucleotide
  misc_difference 11: note = Any 2'-O-methyl nucleotide
  misc_difference 12: note = Any 2'-O-methyl nucleotide
  misc_difference 13: note = Any 2'-O-methyl nucleotide
  misc_difference 14: note = Any 2'-fluoro nucleotide
  misc_difference 15: note = Any 2'-O-methyl nucleotide
  misc_difference 16: note = Any 2'-fluoro nucleotide
  misc_difference 17: note = Any 2'-O-methyl nucleotide
  misc_difference 18: note = Any 2'-O-methyl nucleotide
  misc_difference 19: note = Any nucleotide
  misc_difference 20: note = Any nucleotide
  misc_difference 21: note = Any nucleotide
  misc_difference 22: note = Any 2'-O-methyl nucleotide
  misc_difference 23: note = Any nucleotide
  misc_difference 24: note = Any nucleotide
  modified_base 25: mod_base = OTHER; note = 2'-O-methyl guanosine
  modified_base 26: mod_base = OTHER; note = Deoxythymidine phosphorothioate
  modified_base 28: mod_base = OTHER; note = 2'-O-methyl guanosine
  modified_base 29: mod_base = OTHER; note = 2'-O-methyl uridine
  modified_base 30: mod_base = OTHER; note = 2'-O-methyl adenosine
  modified_base 31: mod_base = OTHER; note = 2'-O-methyl guanosine
  modified_base 32: mod_base = OTHER; note = 2'-O-methyl cytidine
  modified_base 33: mod_base = OTHER; note = Deoxythymidine phosphorothioate
  modified_base 35: mod_base = OTHER; note = Deoxycytidine phosphorothioate
  modified_base 36: mod_base = OTHER; note = 2'-O-methyl cytidine
  modified_base 37: mod_base = OTHER; note = Deoxythymidine phosphorothioate
  modified_base 38: mod_base = OTHER; note = 2'-O-methyl uridine
  modified_base 39: mod_base = OTHER; note = 2'-O-methyl uridine
  modified_base 40: mod_base = OTHER; note = 2'-O-methyl cytidine
  modified_base 41: mod_base = OTHER; note = 2'-O-methyl uridine
  modified_base 42: mod_base = OTHER; note = 2'-O-methyl cytidine
  modified_base 43: mod_base = OTHER; note = 2'-O-methyl adenosine
  modified_base 44: mod_base = OTHER; note = 2'-O-methyl uridine
  modified_base 45: mod_base = OTHER; note = 2'-O-methyl uridine phosphorothioate
  modified_base 46: mod_base = OTHER; note = 2'-O-methyl uridine phosphorothioate
  modified_base 47: mod_base = OTHER; note = 2'-O-methyl cytidine phosphorothioate
  modified_base 48: mod_base = OTHER; note = 2'-O-methyl guanosine
  misc_feature 1..6: note = RNA
  misc_feature 7: note = DNA
  misc_feature 8..25: note = RNA
  misc_feature 26: note = DNA
  misc_feature 27..32: note = RNA
  misc_feature 33: note = DNA
  misc_feature 34: note = RNA
  misc_feature 35: note = DNA
  misc_feature 36: note = RNA
  misc_feature 37: note = DNA
  misc_feature 38..48: note = RNA

SEQ ID NO: 45 - DNA, 48 bp, synthetic construct; identical to SEQ ID NO: 14
  source 1..48: mol_type = other DNA
  misc_difference 1: note = Any 2'-O-methyl nucleotide with a 3' phosphorothioate attached
  misc_difference 2: note = Any 2'-O-methyl nucleotide with a 3' phosphorothioate attached
  misc_difference 3: note = Any 2'-O-methyl nucleotide with a 3' phosphorothioate attached
  misc_difference 4: note = Any 2'-O-methyl nucleotide
  misc_difference 5: note = Any 2'-O-methyl nucleotide
  misc_difference 6: note = Any 2'-O-methyl nucleotide
  misc_difference 7: note = Any nucleotide with a 3' phosphorothioate attached
  misc_difference 8: note = Any 2'-O-methyl nucleotide
  misc_difference 9: note = Any 2'-O-methyl nucleotide
  misc_difference 10: note = Any 2'-O-methyl nucleotide
  misc_difference 11: note = Any 2'-O-methyl nucleotide
  misc_difference 12: note = Any 2'-O-methyl nucleotide
  misc_difference 13: note = Any 2'-O-methyl nucleotide
  misc_difference 14: note = Any 2'-fluoro nucleotide
  misc_difference 15: note = Any 2'-O-methyl nucleotide
  misc_difference 16: note = Any 2'-fluoro nucleotide
  misc_difference 17: note = Any 2'-O-methyl nucleotide
  misc_difference 18: note = Any 2'-O-methyl nucleotide
  misc_difference 19: note = Any nucleotide
  misc_difference 20: note = Any nucleotide
  misc_difference 21: note = Any nucleotide
  misc_difference 22: note = Any 2'-O-methyl nucleotide
  misc_difference 23: note = Any nucleotide
  misc_difference 24: note = Any nucleotide
  modified_base 25: mod_base = OTHER; note = 2'-O-methyl guanosine
  modified_base 26: mod_base = OTHER; note = Deoxythymidine phosphorothioate
  modified_base 28: mod_base = OTHER; note = 2'-O-methyl guanosine
  modified_base 29: mod_base = OTHER; note = 2'-O-methyl uridine
  modified_base 30: mod_base = OTHER; note = 2'-O-methyl adenosine
  modified_base 31: mod_base = OTHER; note = 2'-O-methyl guanosine
  modified_base 32: mod_base = OTHER; note = 2'-O-methyl cytidine
  modified_base 33: mod_base = OTHER; note = Deoxythymidine phosphorothioate
  modified_base 35: mod_base = OTHER; note = 2'-O-methyl cytidine
  modified_base 36: mod_base = OTHER; note = 2'-O-methyl cytidine
  modified_base 37: mod_base = OTHER; note = Deoxythymidine phosphorothioate
  modified_base 38: mod_base = OTHER; note = 2'-O-methyl uridine
  modified_base 39: mod_base = OTHER; note = 2'-O-methyl uridine
  modified_base 40: mod_base = OTHER; note = 2'-O-methyl cytidine
  modified_base 41: mod_base = OTHER; note = 2'-O-methyl uridine
  modified_base 42: mod_base = OTHER; note = 2'-O-methyl cytidine
  modified_base 43: mod_base = OTHER; note = 2'-O-methyl adenosine
  modified_base 44: mod_base = OTHER; note = 2'-O-methyl uridine
  modified_base 45: mod_base = OTHER; note = 2'-O-methyl uridine phosphorothioate
  modified_base 46: mod_base = OTHER; note = 2'-O-methyl uridine phosphorothioate
  modified_base 47: mod_base = OTHER; note = 2'-O-methyl cytidine phosphorothioate
  modified_base 48: mod_base = OTHER; note = 2'-O-methyl guanosine
  misc_feature 1..6: note = RNA
  misc_feature 7: note = DNA
  misc_feature 8..25: note = RNA
  misc_feature 26: note = DNA
  misc_feature 27..32: note = RNA
  misc_feature 33: note = DNA
  misc_feature 34..36: note = RNA
  misc_feature 37: note = DNA
  misc_feature 38..48: note = RNA

SEQ ID NO: 46 - DNA, 48 bp, synthetic construct; identical to SEQ ID NO: 14
  source 1..48: mol_type = other DNA
  misc_difference 1: note = Any 2'-O-methyl nucleotide with a 3' phosphorothioate attached
  misc_difference 2: note = Any 2'-O-methyl nucleotide with a 3' phosphorothioate attached
  misc_difference 3: note = Any 2'-O-methyl nucleotide with a 3' phosphorothioate attached
  misc_difference 4: note = Any 2'-O-methyl nucleotide
  misc_difference 5: note = Any 2'-O-methyl nucleotide
  misc_difference 6: note = Any 2'-O-methyl nucleotide
  misc_difference 7: note = Any nucleotide with a 3' phosphorothioate attached
  misc_difference 8: note = Any 2'-O-methyl nucleotide
  misc_difference 9: note = Any 2'-O-methyl nucleotide
  misc_difference 10: note = Any 2'-O-methyl nucleotide
  misc_difference 11: note = Any 2'-O-methyl nucleotide
  misc_difference 12: note = Any 2'-O-methyl nucleotide
  misc_difference 13: note = Any 2'-O-methyl nucleotide
  misc_difference 14: note = Any 2'-fluoro nucleotide
  misc_difference 15: note = Any 2'-O-methyl nucleotide
  misc_difference 16: note = Any 2'-fluoro nucleotide
  misc_difference 17: note = Any 2'-O-methyl nucleotide
  misc_difference 18: note = Any 2'-O-methyl nucleotide
  misc_difference 19: note = Any nucleotide
  misc_difference 20: note = Any nucleotide
  misc_difference 21: note = Any nucleotide
  misc_difference 22: note = Any 2'-O-methyl nucleotide
  misc_difference 23: note = Any nucleotide
  misc_difference 24: note = Any nucleotide
  modified_base 25: mod_base = OTHER; note = 2'-O-methyl guanosine
  modified_base 26: mod_base = OTHER; note = Deoxythymidine phosphorothioate
  modified_base 28: mod_base = OTHER; note = 2'-O-methyl guanosine
  modified_base 29: mod_base = OTHER; note = 2'-O-methyl uridine
  modified_base 30: mod_base = OTHER; note = 2'-O-methyl adenosine
  modified_base 31: mod_base = OTHER; note = 2'-O-methyl guanosine
  modified_base 32: mod_base = OTHER; note = 2'-O-methyl cytidine
  modified_base 33: mod_base = OTHER; note = Deoxythymidine phosphorothioate
  modified_base 34: mod_base = OTHER; note = Deoxycytidine phosphorothioate
  modified_base 35: mod_base = OTHER; note = 2'-O-methyl cytidine
  modified_base 36: mod_base = OTHER; note = 2'-O-methyl cytidine
  modified_base 37: mod_base = OTHER; note = Deoxythymidine phosphorothioate
  modified_base 38: mod_base = OTHER; note = 2'-O-methyl uridine
  modified_base 39: mod_base = OTHER; note = 2'-O-methyl uridine
  modified_base 40: mod_base = OTHER; note = 2'-O-methyl cytidine
  modified_base 41: mod_base = OTHER; note = 2'-O-methyl uridine
  modified_base 42: mod_base = OTHER; note = 2'-O-methyl cytidine
  modified_base 43: mod_base = OTHER; note = 2'-O-methyl adenosine
  modified_base 44: mod_base = OTHER; note = 2'-O-methyl uridine
  modified_base 45: mod_base = OTHER; note = 2'-O-methyl uridine phosphorothioate
  modified_base 46: mod_base = OTHER; note = 2'-O-methyl uridine phosphorothioate
  modified_base 47: mod_base = OTHER; note = 2'-O-methyl cytidine phosphorothioate
  modified_base 48: mod_base = OTHER; note = 2'-O-methyl guanosine
  misc_feature 1..6: note = RNA
  misc_feature 7: note = DNA
  misc_feature 8..25: note = RNA
  misc_feature 26: note = DNA
  misc_feature 27..32: note = RNA
  misc_feature 33..34: note = DNA
  misc_feature 35..36: note = RNA
  misc_feature 37: note = DNA
  misc_feature 38..48: note = RNA

SEQ ID NO: 47 - DNA, 48 bp, synthetic construct; identical to SEQ ID NO: 14
  source 1..48: mol_type = other DNA
  misc_difference 1: note = Any 2'-O-methyl nucleotide with a 3' phosphorothioate attached
  misc_difference 2: note = Any 2'-O-methyl nucleotide with a 3' phosphorothioate attached
  misc_difference 3: note = Any 2'-O-methyl nucleotide with a 3' phosphorothioate attached
  misc_difference 4: note = Any 2'-O-methyl nucleotide
  misc_difference 5: note = Any 2'-O-methyl nucleotide
  misc_difference 6: note = Any 2'-O-methyl nucleotide
  misc_difference 7: note = Any nucleotide with a 3' phosphorothioate attached
  misc_difference 8: note = Any 2'-O-methyl nucleotide
  misc_difference 9: note = Any 2'-O-methyl nucleotide
  misc_difference 10: note = Any 2'-O-methyl nucleotide
  misc_difference 11: note = Any 2'-O-methyl nucleotide
  misc_difference 12: note = Any 2'-fluoro nucleotide
  misc_difference 13: note = Any 2'-O-methyl nucleotide
  misc_difference 14: note = Any 2'-fluoro nucleotide
  misc_difference 15: note = Any 2'-O-methyl nucleotide
  misc_difference 16: note = Any 2'-fluoro nucleotide
  misc_difference 17: note = Any 2'-O-methyl nucleotide
  misc_difference 18: note = Any 2'-O-methyl nucleotide
  misc_difference 19: note = Any 2'-O-methyl nucleotide
  misc_difference 20: note = Any 2'-O-methyl nucleotide
  misc_difference 21: note = Any 2'-fluoro nucleotide
  misc_difference 22: note = Any 2'-O-methyl nucleotide
  misc_difference 23: note = Any 2'-O-methyl nucleotide
  misc_difference 24: note = Any 2'-O-methyl nucleotide
  modified_base 25: mod_base = OTHER; note = 2'-O-methyl guanosine
  modified_base 28: mod_base = OTHER; note = 2'-O-methyl guanosine
  modified_base 29: mod_base = OTHER; note = 2'-O-methyl uridine
  modified_base 30: mod_base = OTHER; note = 2'-O-methyl adenosine
  modified_base 31: mod_base = OTHER; note = 2'-O-methyl guanosine
  modified_base 32: mod_base = OTHER; note = 2'-O-methyl cytidine
  modified_base 36: mod_base = OTHER; note = Deoxycytidine phosphorothioate
  modified_base 38: mod_base = OTHER; note = 2'-O-methyl uridine
  modified_base 39: mod_base = OTHER; note = 2'-O-methyl uridine
  modified_base 40: mod_base = OTHER; note = 2'-O-methyl cytidine
  modified_base 41: mod_base = OTHER; note = 2'-O-methyl uridine
  modified_base 42: mod_base = OTHER; note = 2'-O-methyl cytidine
  modified_base 43: mod_base = OTHER; note = 2'-O-methyl adenosine
  modified_base 44: mod_base = OTHER; note = 2'-O-methyl uridine
  modified_base 45: mod_base = OTHER; note = 2'-O-methyl uridine phosphorothioate
  modified_base 46: mod_base = OTHER; note = 2'-O-methyl uridine phosphorothioate
  modified_base 47: mod_base = OTHER; note = 2'-O-methyl cytidine phosphorothioate
  modified_base 48: mod_base = OTHER; note = 2'-O-methyl guanosine
  misc_feature 1..6: note = RNA
  misc_feature 7: note = DNA
  misc_feature 8..35: note = RNA
  misc_feature 36: note = DNA
  misc_feature 37..48: note = RNA

SEQ ID NO: 48 - DNA, 48 bp, synthetic construct; identical to SEQ ID NO: 14
  source 1..48: mol_type = other DNA
  misc_difference 1: note = Any 2'-O-methyl nucleotide with a 3' phosphorothioate attached
  misc_difference 2: note = Any 2'-O-methyl nucleotide with a 3' phosphorothioate attached
  misc_difference 3: note = Any 2'-O-methyl nucleotide with a 3' phosphorothioate attached
  misc_difference 4: note = Any 2'-O-methyl nucleotide
  misc_difference 5: note = Any 2'-O-methyl nucleotide
  misc_difference 6: note = Any 2'-O-methyl nucleotide
  misc_difference 7: note = Any nucleotide with a 3' phosphorothioate attached
  misc_difference 8: note = Any 2'-O-methyl nucleotide
  misc_difference 9: note = Any 2'-O-methyl nucleotide
  misc_difference 10: note = Any 2'-O-methyl nucleotide
  misc_difference 11: note = Any 2'-O-methyl nucleotide
  misc_difference 12: note = Any 2'-fluoro nucleotide
  misc_difference 13: note = Any 2'-O-methyl nucleotide
  misc_difference 14: note = Any 2'-fluoro nucleotide
  misc_difference 15: note = Any 2'-O-methyl nucleotide
  misc_difference 16: note = Any 2'-fluoro nucleotide
  misc_difference 17: note = Any 2'-O-methyl nucleotide
  misc_difference 18: note = Any 2'-O-methyl nucleotide
  misc_difference 19: note = Any 2'-O-methyl nucleotide
  misc_difference 20: note = Any 2'-O-methyl nucleotide
  misc_difference 21: note = Any 2'-fluoro nucleotide
  misc_difference 22: note = Any 2'-O-methyl nucleotide
  misc_difference 23: note = Any 2'-O-methyl nucleotide
  misc_difference 24: note = Any 2'-O-methyl nucleotide
  modified_base 25: mod_base = OTHER; note = 2'-O-methyl guanosine
  modified_base 28: mod_base = OTHER; note = 2'-O-methyl guanosine
  modified_base 29: mod_base = OTHER; note = 2'-O-methyl uridine
  modified_base 30: mod_base = OTHER; note = 2'-O-methyl adenosine
  modified_base 31: mod_base = OTHER; note = 2'-O-methyl guanosine
  modified_base 32: mod_base = OTHER; note = 2'-O-methyl cytidine
  modified_base 35: mod_base = OTHER; note = Deoxycytidine phosphorothioate
  modified_base 38: mod_base = OTHER; note = 2'-O-methyl uridine
  modified_base 39: mod_base = OTHER; note = 2'-O-methyl uridine
  modified_base 40: mod_base = OTHER; note = 2'-O-methyl cytidine
  modified_base 41: mod_base = OTHER; note = 2'-O-methyl uridine
  modified_base 42: mod_base = OTHER; note = 2'-O-methyl cytidine
  modified_base 43: mod_base = OTHER; note = 2'-O-methyl adenosine
  modified_base 44: mod_base = OTHER; note = 2'-O-methyl uridine
  modified_base 45: mod_base = OTHER; note = 2'-O-methyl uridine phosphorothioate
  modified_base 46: mod_base = OTHER; note = 2'-O-methyl uridine phosphorothioate
  modified_base 47: mod_base = OTHER; note = 2'-O-methyl cytidine phosphorothioate
  modified_base 48: mod_base = OTHER; note = 2'-O-methyl guanosine
  misc_feature 1..6: note = RNA
  misc_feature 7: note = DNA
  misc_feature 8..34: note = RNA
  misc_feature 35: note = DNA
  misc_feature 36..48: note = RNA

SEQ ID NO: 49 - DNA, 48 bp, synthetic construct; identical to SEQ ID NO: 14
  source 1..48: mol_type = other DNA
  misc_difference 1: note = Any 2'-O-methyl nucleotide with a 3' phosphorothioate attached
  misc_difference 2: note = Any 2'-O-methyl nucleotide with a 3' phosphorothioate attached
  misc_difference 3: note = Any 2'-O-methyl nucleotide with a 3' phosphorothioate attached
  misc_difference 4: note = Any 2'-O-methyl nucleotide
  misc_difference 5: note = Any 2'-O-methyl nucleotide
  misc_difference 6: note = Any 2'-O-methyl nucleotide
  misc_difference 7: note = Any nucleotide with a 3' phosphorothioate attached
  misc_difference 8: note = Any 2'-O-methyl nucleotide
  misc_difference 9: note = Any 2'-O-methyl nucleotide
  misc_difference 10: note = Any 2'-O-methyl nucleotide
  misc_difference 11: note = Any 2'-O-methyl nucleotide
  misc_difference 12: note = Any 2'-fluoro nucleotide
  misc_difference 13: note = Any 2'-O-methyl nucleotide
  misc_difference 14: note = Any 2'-fluoro nucleotide
  misc_difference 15: note = Any 2'-O-methyl nucleotide
  misc_difference 16: note = Any 2'-fluoro nucleotide
  misc_difference 17: note = Any 2'-O-methyl nucleotide
  misc_difference 18: note = Any 2'-O-methyl nucleotide
  misc_difference 19: note = Any 2'-O-methyl nucleotide
  misc_difference 20: note = Any 2'-O-methyl nucleotide
  misc_difference 21: note = Any 2'-fluoro nucleotide
  misc_difference 22: note = Any 2'-O-methyl nucleotide
  misc_difference 23: note = Any 2'-O-methyl nucleotide
  misc_difference 24: note = Any 2'-O-methyl nucleotide
  modified_base 25: mod_base = OTHER; note = 2'-O-methyl guanosine
  modified_base 28: mod_base = OTHER; note = 2'-O-methyl guanosine
  modified_base 29: mod_base = OTHER; note = 2'-O-methyl uridine
  modified_base 30: mod_base = OTHER; note = 2'-O-methyl adenosine
  modified_base 31: mod_base = OTHER; note = 2'-O-methyl guanosine
  modified_base 32: mod_base = OTHER; note = 2'-O-methyl cytidine
  modified_base 37: mod_base = OTHER; note = Deoxythymidine phosphorothioate
  modified_base 38: mod_base = OTHER; note = 2'-O-methyl uridine
  modified_base 39: mod_base = OTHER; note = 2'-O-methyl uridine
  modified_base 40: mod_base = OTHER; note = 2'-O-methyl cytidine
  modified_base 41: mod_base = OTHER; note = 2'-O-methyl uridine
  modified_base 42: mod_base = OTHER; note = 2'-O-methyl cytidine
  modified_base 43: mod_base = OTHER; note = 2'-O-methyl adenosine
  modified_base 44: mod_base = OTHER; note = 2'-O-methyl uridine
  modified_base 45: mod_base = OTHER; note = 2'-O-methyl uridine phosphorothioate
  modified_base 46: mod_base = OTHER; note = 2'-O-methyl uridine phosphorothioate
  modified_base 47: mod_base = OTHER; note = 2'-O-methyl cytidine phosphorothioate
  modified_base 48: mod_base = OTHER; note = 2'-O-methyl guanosine
  misc_feature 1..6: note = RNA
  misc_feature 7: note = DNA
  misc_feature 8..36: note = RNA
  misc_feature 37: note = DNA
  misc_feature 38..48: note = RNA

SEQ ID NO: 50 - DNA, 48 bp, synthetic construct; identical to SEQ ID NO: 14
  source 1..48: mol_type = other DNA
  misc_difference 1: note = Any 2'-O-methyl nucleotide with a 3' phosphorothioate attached
  misc_difference 2: note = Any 2'-O-methyl nucleotide with a 3' phosphorothioate attached
  misc_difference 3: note = Any 2'-O-methyl nucleotide with a 3' phosphorothioate attached
  misc_difference 4: note = Any 2'-O-methyl nucleotide
  misc_difference 5: note = Any 2'-O-methyl nucleotide
  misc_difference 6: note = Any 2'-O-methyl nucleotide
  misc_difference 7: note = Any nucleotide with a 3' phosphorothioate attached
  misc_difference 8: note = Any 2'-O-methyl nucleotide
  misc_difference 9: note = Any 2'-O-methyl nucleotide
  misc_difference 10: note = Any 2'-O-methyl nucleotide
  misc_difference 11: note = Any 2'-O-methyl nucleotide
  misc_difference 12: note = Any 2'-fluoro nucleotide
  misc_difference 13: note = Any 2'-O-methyl nucleotide
  misc_difference 14: note = Any 2'-fluoro nucleotide
  misc_difference 15: note = Any 2'-O-methyl nucleotide
  misc_difference 16: note = Any 2'-fluoro nucleotide
  misc_difference 17: note = Any 2'-O-methyl nucleotide
  misc_difference 18: note = Any 2'-O-methyl nucleotide
  misc_difference 19: note = Any 2'-O-methyl nucleotide
  misc_difference 20: note = Any 2'-O-methyl nucleotide
  misc_difference 21: note = Any 2'-fluoro nucleotide
  misc_difference 22: note = Any 2'-O-methyl nucleotide
  misc_difference 23: note = Any 2'-O-methyl nucleotide
  misc_difference 24: note = Any 2'-O-methyl nucleotide
  modified_base 25: mod_base = OTHER; note = 2'-O-methyl guanosine
  modified_base 28: mod_base = OTHER; note = 2'-O-methyl guanosine
  modified_base 29: mod_base = OTHER; note = 2'-O-methyl uridine
  modified_base 30: mod_base = OTHER; note = 2'-O-methyl adenosine
  modified_base 31: mod_base = OTHER; note = 2'-O-methyl guanosine
  modified_base 32: mod_base = OTHER; note = 2'-O-methyl cytidine
  modified_base 35: mod_base = OTHER; note = 2'-O-methyl cytidine
  modified_base 38: mod_base = OTHER; note = 2'-O-methyl uridine
  modified_base 39: mod_base = OTHER; note = 2'-O-methyl uridine
  modified_base 40: mod_base = OTHER; note = 2'-O-methyl cytidine
  modified_base 41: mod_base = OTHER; note = 2'-O-methyl uridine
  modified_base 42: mod_base = OTHER; note = 2'-O-methyl cytidine
  modified_base 43: mod_base = OTHER; note = 2'-O-methyl adenosine
  modified_base 44: mod_base = OTHER; note = 2'-O-methyl uridine
  modified_base 45: mod_base = OTHER; note = 2'-O-methyl uridine phosphorothioate
  modified_base 46: mod_base = OTHER; note = 2'-O-methyl uridine phosphorothioate
  modified_base 47: mod_base = OTHER; note = 2'-O-methyl cytidine phosphorothioate
  modified_base 48: mod_base = OTHER; note = 2'-O-methyl guanosine
  misc_feature 1..6: note = RNA
  misc_feature 7: note = DNA
  misc_feature 8..48: note = RNA

SEQ ID NO: 51 - DNA, 48 bp, synthetic construct; identical to SEQ ID NO: 14
  source 1..48: mol_type = other DNA
  misc_difference 1: note = Any 2'-O-methyl nucleotide with a 3' phosphorothioate attached
  misc_difference 2: note = Any 2'-O-methyl nucleotide with a 3' phosphorothioate attached
  misc_difference 3: note = Any 2'-O-methyl nucleotide with a 3' phosphorothioate attached
  misc_difference 4: note = Any 2'-O-methyl nucleotide
  misc_difference 5: note = Any 2'-O-methyl nucleotide
  misc_difference 6: note = Any 2'-O-methyl nucleotide
  misc_difference 7: note = Any nucleotide with a 3' phosphorothioate attached
  misc_difference 8: note = Any 2'-O-methyl nucleotide
  misc_difference 9: note = Any 2'-O-methyl nucleotide
  misc_difference 10: note = Any 2'-O-methyl nucleotide
  misc_difference 11: note = Any 2'-O-methyl nucleotide
  misc_difference 12: note = Any 2'-fluoro nucleotide
  misc_difference 13: note = Any 2'-O-methyl nucleotide
  misc_difference 14: note = Any 2'-fluoro nucleotide
  misc_difference 15: note = Any 2'-O-methyl nucleotide
  misc_difference 16: note = Any 2'-fluoro nucleotide
  misc_difference 17: note = Any 2'-O-methyl nucleotide
  misc_difference 18: note = Any 2'-O-methyl nucleotide
  misc_difference 19: note = Any 2'-O-methyl nucleotide
  misc_difference 20: note = Any 2'-O-methyl nucleotide
  misc_difference 21: note = Any 2'-fluoro nucleotide
  misc_difference 22: note = Any 2'-O-methyl nucleotide
  misc_difference 23: note = Any 2'-O-methyl nucleotide
  misc_difference 24: note = Any 2'-O-methyl nucleotide
  modified_base 25: mod_base = OTHER; note = 2'-O-methyl guanosine
  modified_base 28: mod_base = OTHER; note = 2'-O-methyl guanosine
  modified_base 29: mod_base = OTHER; note = 2'-O-methyl uridine
  modified_base 30: mod_base = OTHER; note = 2'-O-methyl adenosine
  modified_base 31: mod_base = OTHER; note = 2'-O-methyl guanosine
  modified_base 32: mod_base = OTHER; note = 2'-O-methyl cytidine
  modified_base 35: mod_base = OTHER; note = Deoxycytidine phosphorothioate
  modified_base 36: mod_base = OTHER; note = Deoxycytidine phosphorothioate
  modified_base 38: mod_base = OTHER; note = 2'-O-methyl uridine
  modified_base 39: mod_base = OTHER; note = 2'-O-methyl uridine
  modified_base 40: mod_base = OTHER; note = 2'-O-methyl cytidine
  modified_base 41: mod_base = OTHER; note = 2'-O-methyl uridine
  modified_base 42: mod_base = OTHER; note = 2'-O-methyl cytidine
  modified_base 43: mod_base = OTHER; note = 2'-O-methyl adenosine
  modified_base 44: mod_base = OTHER; note = 2'-O-methyl uridine
  modified_base 45: mod_base = OTHER; note = 2'-O-methyl uridine phosphorothioate
  modified_base 46: mod_base = OTHER; note = 2'-O-methyl uridine phosphorothioate
  modified_base 47: mod_base = OTHER; note = 2'-O-methyl cytidine phosphorothioate
  modified_base 48: mod_base = OTHER; note = 2'-O-methyl guanosine
  misc_feature 1..6: note = RNA
  misc_feature 7: note = DNA
  misc_feature 8..34: note = RNA
  misc_feature 35..36: note = DNA
  misc_feature 37..48: note = RNA

SEQ ID NO: 52 - DNA, 48 bp, synthetic construct; identical to SEQ ID NO: 14
  source 1..48: mol_type = other DNA
  misc_difference 1: note = Any 2'-O-methyl nucleotide with a 3' phosphorothioate attached
  misc_difference 2: note = Any 2'-O-methyl nucleotide with a 3' phosphorothioate attached
  misc_difference 3: note = Any 2'-O-methyl nucleotide with a 3' phosphorothioate attached
  misc_difference 4: note = Any 2'-O-methyl nucleotide
  misc_difference 5: note = Any 2'-O-methyl nucleotide
  misc_difference 6: note = Any 2'-O-methyl nucleotide
  misc_difference 7: note = Any nucleotide with a 3' phosphorothioate attached
  misc_difference 8: note = Any 2'-O-methyl nucleotide
  misc_difference 9: note = Any 2'-O-methyl nucleotide
  misc_difference 10: note = Any 2'-O-methyl nucleotide
  misc_difference 11: note = Any 2'-O-methyl nucleotide
  misc_difference 12: note = Any 2'-fluoro nucleotide
  misc_difference 13: note = Any 2'-O-methyl nucleotide
  misc_difference 14: note = Any 2'-fluoro nucleotide
  misc_difference 15: note = Any 2'-O-methyl nucleotide
  misc_difference 16: note = Any 2'-fluoro nucleotide
  misc_difference 17: note = Any 2'-O-methyl nucleotide
  misc_difference 18: note = Any 2'-O-methyl nucleotide
  misc_difference 19: note = Any 2'-O-methyl nucleotide
  misc_difference 20: note = Any 2'-O-methyl nucleotide
  misc_difference 21: note = Any 2'-fluoro nucleotide
  misc_difference 22: note = Any 2'-O-methyl nucleotide
  misc_difference 23: note = Any 2'-O-methyl nucleotide
  misc_difference 24: note = Any 2'-O-methyl nucleotide
  modified_base 25: mod_base = OTHER; note = 2'-O-methyl guanosine
  modified_base 28: mod_base = OTHER; note = 2'-O-methyl guanosine
  modified_base 29: mod_base = OTHER; note = 2'-O-methyl uridine
  modified_base 30: mod_base = OTHER; note = 2'-O-methyl adenosine
  modified_base 31: mod_base = OTHER; note = 2'-O-methyl guanosine
  modified_base 32: mod_base = OTHER; note = 2'-O-methyl cytidine
  modified_base 35: mod_base = OTHER; note = Deoxycytidine phosphorothioate
  modified_base 37: mod_base = OTHER; note = Deoxythymidine phosphorothioate
  modified_base 38: mod_base = OTHER; note = 2'-O-methyl uridine
  modified_base 39: mod_base = OTHER; note = 2'-O-methyl uridine
  modified_base 40: mod_base = OTHER; note = 2'-O-methyl cytidine
  modified_base 41: mod_base = OTHER; note = 2'-O-methyl uridine
  modified_base 42: mod_base = OTHER; note = 2'-O-methyl cytidine
  modified_base 43: mod_base = OTHER; note = 2'-O-methyl adenosine
  modified_base 44: mod_base = OTHER; note = 2'-O-methyl uridine
  modified_base 45: mod_base = OTHER; note = 2'-O-methyl uridine phosphorothioate
  modified_base 46: mod_base = OTHER; note = 2'-O-methyl uridine phosphorothioate
  modified_base 47: mod_base = OTHER; note = 2'-O-methyl cytidine phosphorothioate
  modified_base 48: mod_base = OTHER; note = 2'-O-methyl guanosine
  misc_feature 1..6: note = RNA
  misc_feature 7: note = DNA
  misc_feature 8..34: note = RNA
  misc_feature 35: note = DNA
  misc_feature 36: note = RNA
  misc_feature 37: note = DNA
  misc_feature 38..48: note = RNA

SEQ ID NO: 53 - DNA, 48 bp, synthetic construct; identical to SEQ ID NO: 14
  source 1..48: mol_type = other DNA
  misc_difference 1: note = Any 2'-O-methyl nucleotide with a 3' phosphorothioate attached
  misc_difference 2: note = Any 2'-O-methyl nucleotide with a 3' phosphorothioate attached
  misc_difference 3: note = Any 2'-O-methyl nucleotide with a 3' phosphorothioate attached
  misc_difference 4: note = Any 2'-O-methyl nucleotide
  misc_difference 5: note = Any 2'-O-methyl nucleotide
  misc_difference 6: note = Any 2'-O-methyl nucleotide
  misc_difference 7: note = Any nucleotide with a 3' phosphorothioate attached
  misc_difference 8: note = Any 2'-O-methyl nucleotide
  misc_difference 9: note = Any 2'-O-methyl nucleotide
  misc_difference 10: note = Any 2'-O-methyl nucleotide
  misc_difference 11: note = Any 2'-O-methyl nucleotide
  misc_difference 12: note = Any 2'-fluoro nucleotide
  misc_difference 13: note = Any 2'-O-methyl nucleotide
  misc_difference 14: note = Any 2'-fluoro nucleotide
  misc_difference 15: note = Any 2'-O-methyl nucleotide
  misc_difference 16: note = Any 2'-fluoro nucleotide
  misc_difference 17: note = Any 2'-O-methyl nucleotide
  misc_difference 18: note = Any 2'-O-methyl nucleotide
  misc_difference 19: note = Any 2'-O-methyl nucleotide
  misc_difference 20: note = Any 2'-O-methyl nucleotide
  misc_difference 21: note = Any 2'-fluoro nucleotide
  misc_difference 22: note = Any 2'-O-methyl nucleotide
  misc_difference 23: note = Any 2'-O-methyl nucleotide
  misc_difference 24: note = Any 2'-O-methyl nucleotide
  modified_base 25: mod_base = OTHER; note = 2'-O-methyl guanosine
  modified_base 28: mod_base = OTHER; note = 2'-O-methyl guanosine
  modified_base 29: mod_base = OTHER; note = 2'-O-methyl uridine
  modified_base 30: mod_base = OTHER; note = 2'-O-methyl adenosine
  modified_base 31: mod_base = OTHER; note = 2'-O-methyl guanosine
  modified_base 32: mod_base = OTHER; note = 2'-O-methyl cytidine
  modified_base 35: mod_base = OTHER; note = Deoxycytidine phosphorothioate
  modified_base 36: mod_base = OTHER; note = Deoxycytidine phosphorothioate
  modified_base 37: mod_base = OTHER; note = Deoxythymidine phosphorothioate
  modified_base 38: mod_base = OTHER; note = 2'-O-methyl uridine
  modified_base 39: mod_base = OTHER; note = 2'-O-methyl uridine
  modified_base 40: mod_base = OTHER; note = 2'-O-methyl cytidine
  modified_base 41: mod_base = OTHER; note = 2'-O-methyl uridine
  modified_base 42: mod_base = OTHER; note = 2'-O-methyl cytidine
  modified_base 43: mod_base = OTHER; note = 2'-O-methyl adenosine
  modified_base 44: mod_base = OTHER; note = 2'-O-methyl uridine
  modified_base 45: mod_base = OTHER; note = 2'-O-methyl uridine phosphorothioate
  modified_base 46: mod_base = OTHER; note = 2'-O-methyl uridine phosphorothioate
  modified_base 47: mod_base = OTHER; note = 2'-O-methyl cytidine phosphorothioate
  modified_base 48: mod_base = OTHER; note = 2'-O-methyl guanosine
  misc_feature 1..6: note = RNA
  misc_feature 7: note = DNA
  misc_feature 8..34: note = RNA
  misc_feature 35..37: note = DNA
  misc_feature 38..48: note = RNA

SEQ ID NO: 54 - DNA, 48 bp, synthetic construct; identical to SEQ ID NO: 14
  source 1..48: mol_type = other DNA
  misc_difference 1: note = Any 2'-O-methyl nucleotide with a 3' phosphorothioate attached
  misc_difference 2: note = Any 2'-O-methyl nucleotide with a 3' phosphorothioate attached
  misc_difference 3: note = Any 2'-O-methyl nucleotide with a 3' phosphorothioate attached
  misc_difference 4: note = Any 2'-O-methyl nucleotide
  misc_difference 5: note = Any 2'-O-methyl nucleotide
  misc_difference 6: note = Any 2'-O-methyl nucleotide
  misc_difference 7: note = Any nucleotide with a 3' phosphorothioate attached
  misc_difference 8: note = Any 2'-O-methyl nucleotide
  misc_difference 9: note = Any 2'-O-methyl nucleotide
  misc_difference 10: note = Any 2'-O-methyl nucleotide
  misc_difference 11: note = Any 2'-O-methyl nucleotide
  misc_difference 12: note = Any 2'-fluoro nucleotide
  misc_difference 13: note = Any 2'-O-methyl nucleotide
  misc_difference 14: note = Any 2'-fluoro nucleotide
  misc_difference 15: note = Any 2'-O-methyl nucleotide
  misc_difference 16: note = Any 2'-fluoro nucleotide
  misc_difference 17: note = Any 2'-O-methyl nucleotide
  misc_difference 18: note = Any 2'-O-methyl nucleotide
  misc_difference 19: note = Any 2'-O-methyl nucleotide
  misc_difference 20: note = Any 2'-O-methyl nucleotide
  misc_difference 21: note = Any 2'-fluoro nucleotide
  misc_difference 22: note = Any 2'-O-methyl nucleotide
  misc_difference 23: note = Any 2'-O-methyl nucleotide
  misc_difference 24: note = Any 2'-O-methyl nucleotide
  modified_base 25: mod_base = OTHER; note = 2'-O-methyl guanosine
  modified_base 28: mod_base = OTHER; note = 2'-O-methyl guanosine
  modified_base 29: mod_base = OTHER; note = 2'-O-methyl uridine
  modified_base 30: mod_base = OTHER; note = 2'-O-methyl adenosine
  modified_base 31: mod_base = OTHER; note = 2'-O-methyl guanosine
  modified_base 32: mod_base = OTHER; note = 2'-O-methyl cytidine
  modified_base 35: mod_base = OTHER; note = 2'-O-methyl cytidine
  modified_base 36: mod_base = OTHER; note = Deoxycytidine phosphorothioate
  modified_base 38: mod_base = OTHER; note = 2'-O-methyl uridine
  modified_base 39: mod_base = OTHER; note = 2'-O-methyl uridine
  modified_base 40: mod_base = OTHER; note = 2'-O-methyl cytidine
  modified_base 41: mod_base = OTHER; note = 2'-O-methyl uridine
  modified_base 42: mod_base = OTHER; note = 2'-O-methyl cytidine
  modified_base 43: mod_base = OTHER; note = 2'-O-methyl adenosine
  modified_base 44: mod_base = OTHER; note = 2'-O-methyl uridine
  modified_base 45: mod_base = OTHER; note = 2'-O-methyl uridine phosphorothioate
  modified_base 46: mod_base = OTHER; note = 2'-O-methyl uridine phosphorothioate
  modified_base 47: mod_base = OTHER; note = 2'-O-methyl cytidine phosphorothioate
  modified_base 48: mod_base = OTHER; note = 2'-O-methyl guanosine
  misc_feature 1..6: note = RNA
  misc_feature 7: note = DNA
  misc_feature 8..35: note = RNA
  misc_feature 36: note = DNA
  misc_feature 37..48: note = RNA

SEQ ID NO: 55 - DNA, 48 bp, synthetic construct; identical to SEQ ID NO: 14
  source 1..48: mol_type = other DNA
  misc_difference 1: note = Any 2'-O-methyl nucleotide with a 3' phosphorothioate attached
  misc_difference 2: note = Any 2'-O-methyl nucleotide with a 3' phosphorothioate attached
  misc_difference 3: note = Any 2'-O-methyl nucleotide with a 3' phosphorothioate attached
  misc_difference 4: note = Any 2'-O-methyl nucleotide
  misc_difference 5: note = Any 2'-O-methyl nucleotide
  misc_difference 6: note = Any 2'-O-methyl nucleotide
  misc_difference 7: note = Any nucleotide with a 3' phosphorothioate attached
  misc_difference 8: note = Any 2'-O-methyl nucleotide
  misc_difference 9: note = Any 2'-O-methyl nucleotide
  misc_difference 10: note = Any 2'-O-methyl nucleotide
  misc_difference 11: note = Any 2'-O-methyl nucleotide
  misc_difference 12: note = Any 2'-fluoro nucleotide
  misc_difference 13: note = Any 2'-O-methyl nucleotide
  misc_difference 14: note = Any 2'-fluoro nucleotide
  misc_difference 15: note = Any 2'-O-methyl nucleotide
  misc_difference 16: note = Any 2'-fluoro nucleotide
  misc_difference 17: note = Any 2'-O-methyl nucleotide
  misc_difference 18: note = Any 2'-O-methyl nucleotide
  misc_difference 19: note = Any 2'-O-methyl nucleotide
  misc_difference 20: note = Any 2'-O-methyl nucleotide
  misc_difference 21: note = Any 2'-fluoro nucleotide
  misc_difference 22: note = Any 2'-O-methyl nucleotide
  misc_difference 23: note = Any 2'-O-methyl nucleotide
  misc_difference 24: note = Any 2'-O-methyl nucleotide
  modified_base 25: mod_base = OTHER; note = 2'-O-methyl guanosine
  modified_base 28: mod_base = OTHER; note = 2'-O-methyl guanosine
  modified_base 29: mod_base = OTHER; note = 2'-O-methyl uridine
  modified_base 30: mod_base = OTHER; note = 2'-O-methyl adenosine
  modified_base 31: mod_base = OTHER; note = 2'-O-methyl guanosine
  modified_base 32: mod_base = OTHER; note = 2'-O-methyl cytidine
  modified_base 35: mod_base = OTHER; note = 2'-O-methyl cytidine
  modified_base 37: mod_base = OTHER; note = Deoxythymidine phosphorothioate
  modified_base 38: mod_base = OTHER; note = 2'-O-methyl uridine
  modified_base 39: mod_base = OTHER; note = 2'-O-methyl uridine
  modified_base 40: mod_base = OTHER; note = 2'-O-methyl cytidine
  modified_base 41: mod_base = OTHER; note = 2'-O-methyl uridine
  modified_base 42: mod_base = OTHER; note = 2'-O-methyl cytidine
  modified_base 43: mod_base = OTHER; note = 2'-O-methyl adenosine
  modified_base 44: mod_base = OTHER; note = 2'-O-methyl uridine
  modified_base 45: mod_base = OTHER; note = 2'-O-methyl uridine phosphorothioate
  modified_base 46: mod_base = OTHER; note = 2'-O-methyl uridine phosphorothioate
  modified_base 47: mod_base = OTHER; note = 2'-O-methyl cytidine phosphorothioate
  modified_base 48: mod_base = OTHER; note = 2'-O-methyl guanosine
  misc_feature 1..6: note = RNA
  misc_feature 7: note = DNA
  misc_feature 8..36: note = RNA
  misc_feature 37: note = DNA
  misc_feature 38..48: note = RNA

SEQ ID NO: 56 - DNA, 48 bp, synthetic construct; identical to SEQ ID NO: 14
  source 1..48: mol_type = other DNA
  misc_difference 1: note = Any 2'-O-methyl nucleotide with a 3' phosphorothioate attached
  misc_difference 2: note = Any 2'-O-methyl nucleotide with a 3' phosphorothioate attached
  misc_difference 3: note = Any 2'-O-methyl nucleotide with a 3' phosphorothioate attached
  misc_difference 4: note = Any 2'-O-methyl nucleotide
  misc_difference 5: note = Any 2'-O-methyl nucleotide
  misc_difference 6: note = Any 2'-O-methyl nucleotide
  misc_difference 7: note = Any nucleotide with a 3' phosphorothioate attached
  misc_difference 8: note = Any 2'-O-methyl nucleotide
  misc_difference 9: note = Any 2'-O-methyl nucleotide
  misc_difference 10: note = Any 2'-O-methyl nucleotide
  misc_difference 11: note = Any 2'-O-methyl nucleotide
  misc_difference 12: note = Any 2'-fluoro nucleotide
  misc_difference 13: note = Any 2'-O-methyl nucleotide
  misc_difference 14: note = Any 2'-fluoro nucleotide
  misc_difference 15: note = Any 2'-O-methyl nucleotide
  misc_difference 16: note = Any 2'-fluoro nucleotide
  misc_difference 17: note = Any 2'-O-methyl nucleotide
  misc_difference 18: note = Any 2'-O-methyl nucleotide
  misc_difference 19: note = Any 2'-O-methyl nucleotide
  misc_difference 20: note = Any 2'-O-methyl nucleotide
  misc_difference 21: note = Any 2'-fluoro nucleotide
  misc_difference 22: note = Any 2'-O-methyl nucleotide
  misc_difference 23: note = Any 2'-O-methyl nucleotide
  misc_difference 24: note = Any 2'-O-methyl nucleotide
  modified_base 25: mod_base = OTHER; note = 2'-O-methyl guanosine
  modified_base 28: mod_base = OTHER; note = 2'-O-methyl guanosine
  modified_base 29: mod_base = OTHER; note = 2'-O-methyl uridine
  modified_base 30: mod_base = OTHER; note = 2'-O-methyl adenosine
  modified_base 31: mod_base = OTHER; note = 2'-O-methyl guanosine
  modified_base 32: mod_base = OTHER; note = 2'-O-methyl cytidine
  modified_base 35: mod_base = OTHER; note = 2'-O-methyl cytidine
  modified_base 36: mod_base = OTHER; note = Deoxycytidine phosphorothioate
  modified_base 37: mod_base = OTHER; note = Deoxythymidine phosphorothioate
  modified_base 38: mod_base = OTHER; note = 2'-O-methyl uridine
  modified_base 39: mod_base = OTHER; note = 2'-O-methyl uridine
  modified_base 40: mod_base = OTHER; note = 2'-O-methyl cytidine
  modified_base 41: mod_base = OTHER; note = 2'-O-methyl uridine
  modified_base 42: mod_base = OTHER; note = 2'-O-methyl cytidine
  modified_base 43: mod_base = OTHER; note = 2'-O-methyl adenosine
  modified_base 44: mod_base = OTHER; note = 2'-O-methyl uridine
  modified_base 45: mod_base = OTHER; note = 2'-O-methyl uridine phosphorothioate
  modified_base 46: mod_base = OTHER; note = 2'-O-methyl uridine phosphorothioate
  modified_base 47: mod_base = OTHER; note = 2'-O-methyl cytidine phosphorothioate
  modified_base 48: mod_base = OTHER; note = 2'-O-methyl guanosine
  misc_feature 1..6: note = RNA
  misc_feature 7: note = DNA
  misc_feature 8..35: note = RNA
  misc_feature 36..37: note = DNA
  misc_feature 38..48: note = RNA

SEQ ID NO: 57 - DNA, 48 bp, synthetic construct; identical to SEQ ID NO: 14
  source 1..48: mol_type = other DNA
  misc_difference 1: note = Any 2'-O-methyl nucleotide with a 3' phosphorothioate attached
  misc_difference 2: note = Any 2'-O-methyl nucleotide with a 3' phosphorothioate attached
  misc_difference 3: note = Any 2'-O-methyl nucleotide with a 3' phosphorothioate attached
  misc_difference 4: note = Any 2'-O-methyl nucleotide
  misc_difference 5: note = Any 2'-O-methyl nucleotide
  misc_difference 6: note = Any 2'-O-methyl nucleotide
  misc_difference 7: note = Any nucleotide with a 3' phosphorothioate attached
  misc_difference 8: note = Any 2'-O-methyl nucleotide
  misc_difference 9: note = Any 2'-O-methyl nucleotide
  misc_difference 10: note = Any 2'-O-methyl nucleotide
  misc_difference 11: note = Any 2'-O-methyl nucleotide
  misc_difference 12: note = Any 2'-fluoro nucleotide
  misc_difference 13: note = Any 2'-O-methyl nucleotide
  misc_difference 14: note = Any 2'-fluoro nucleotide
  misc_difference 15: note = Any 2'-O-methyl nucleotide
  misc_difference 16: note = Any 2'-fluoro nucleotide
  misc_difference 17: note = Any 2'-O-methyl nucleotide
  misc_difference 18: note = Any 2'-O-methyl nucleotide
  misc_difference 19: note = Any 2'-O-methyl nucleotide
  misc_difference 20: note = Any 2'-O-methyl nucleotide
  misc_difference 21: note = Any 2'-fluoro nucleotide
  misc_difference 22: note = Any 2'-O-methyl nucleotide
  misc_difference 23: note = Any 2'-O-methyl nucleotide
  misc_difference 24: note = Any 2'-O-methyl nucleotide
  modified_base 25: mod_base = OTHER; note = 2'-O-methyl guanosine
  modified_base 28: mod_base = OTHER; note = 2'-O-methyl guanosine
  modified_base 29: mod_base = OTHER; note = 2'-O-methyl uridine
  modified_base 30: mod_base = OTHER; note = 2'-O-methyl adenosine
  modified_base 31: mod_base = OTHER; note = 2'-O-methyl guanosine
  modified_base 32: mod_base = OTHER; note = 2'-O-methyl cytidine
  modified_base 35: mod_base = OTHER; note = 2'-O-methyl cytidine
  modified_base 36: mod_base = OTHER; note = 2'-O-methyl cytidine
  modified_base 38: mod_base = OTHER; note = 2'-O-methyl uridine
  modified_base 39: mod_base = OTHER; note = 2'-O-methyl uridine
  modified_base 40: mod_base = OTHER; note = 2'-O-methyl cytidine
  modified_base 41: mod_base = OTHER; note = 2'-O-methyl uridine
  modified_base 42: mod_base = OTHER; note = 2'-O-methyl cytidine
  modified_base 43: mod_base = OTHER; note = 2'-O-methyl adenosine
  modified_base 44: mod_base = OTHER; note = 2'-O-methyl uridine
  modified_base 45: mod_base = OTHER; note = 2'-O-methyl uridine phosphorothioate
  modified_base 46: mod_base = OTHER; note = 2'-O-methyl uridine phosphorothioate
  modified_base 47: mod_base = OTHER; note = 2'-O-methyl cytidine phosphorothioate
  modified_base 48: mod_base = OTHER; note = 2'-O-methyl guanosine
  misc_feature 1..6: note = RNA
  misc_feature 7: note = DNA
  misc_feature 8..48: note = RNA

SEQ ID NO: 58 - DNA, 48 bp, synthetic construct; identical to SEQ ID NO: 14
  source 1..48: mol_type = other DNA
  misc_difference 1: note = Any 2'-O-methyl nucleotide with a 3' phosphorothioate attached
  misc_difference 2: note = Any 2'-O-methyl nucleotide with a 3' phosphorothioate attached
  misc_difference 3: note = Any 2'-O-methyl nucleotide with a 3' phosphorothioate attached
  misc_difference 4: note = Any 2'-O-methyl nucleotide
  misc_difference 5: note = Any 2'-O-methyl nucleotide
  misc_difference 6: note = Any 2'-O-methyl nucleotide
  misc_difference 7: note = Any nucleotide with a 3' phosphorothioate attached
  misc_difference 8: note = Any 2'-O-methyl nucleotide
  misc_difference 9: note = Any 2'-O-methyl nucleotide
  misc_difference 10: note = Any 2'-O-methyl nucleotide
  misc_difference 11: note = Any 2'-O-methyl nucleotide
  misc_difference 12: note = Any 2'-fluoro nucleotide
  misc_difference 13: note = Any 2'-O-methyl nucleotide
  misc_difference 14: note = Any 2'-fluoro nucleotide
  misc_difference 15: note = Any 2'-O-methyl nucleotide
  misc_difference 16: note = Any 2'-fluoro nucleotide
  misc_difference 17: note = Any 2'-O-methyl nucleotide
  misc_difference 18: note = Any 2'-O-methyl nucleotide
  misc_difference 19: note = Any 2'-O-methyl nucleotide
  misc_difference 20: note = Any 2'-O-methyl nucleotide
  misc_difference 21: note = Any 2'-fluoro nucleotide
  misc_difference 22: note = Any 2'-O-methyl nucleotide
  misc_difference 23: note = Any 2'-O-methyl nucleotide
  misc_difference 24: note = Any 2'-O-methyl nucleotide
  modified_base 25: mod_base = OTHER; note = 2'-O-methyl guanosine
  modified_base 28: mod_base = OTHER; note = 2'-O-methyl guanosine
  modified_base 29: mod_base = OTHER; note = 2'-O-methyl uridine
  modified_base 30: mod_base = OTHER; note = 2'-O-methyl adenosine
  modified_base 31: mod_base = OTHER; note = 2'-O-methyl guanosine
  modified_base 32: mod_base = OTHER; note = 2'-O-methyl cytidine
  modified_base 35: mod_base = OTHER; note = 2'-O-methyl cytidine
  modified_base 36: mod_base = OTHER; note = 2'-O-methyl cytidine
  modified_base 37: mod_base = OTHER; note = Deoxythymidine phosphorothioate
  modified_base 38: mod_base = OTHER; note = 2'-O-methyl uridine
  modified_base 39: mod_base = OTHER; note = 2'-O-methyl uridine
  modified_base 40: mod_base = OTHER; note = 2'-O-methyl cytidine
  modified_base 41: mod_base = OTHER; note = 2'-O-methyl uridine
  modified_base 42: mod_base = OTHER; note = 2'-O-methyl cytidine
  modified_base 43: mod_base = OTHER; note = 2'-O-methyl adenosine
  modified_base 44: mod_base = OTHER; note = 2'-O-methyl uridine
  modified_base 45: mod_base = OTHER; note = 2'-O-methyl uridine phosphorothioate
  modified_base 46: mod_base = OTHER; note = 2'-O-methyl uridine phosphorothioate
  modified_base 47: mod_base = OTHER; note = 2'-O-methyl cytidine phosphorothioate
  modified_base 48: mod_base = OTHER; note = 2'-O-methyl guanosine
  misc_feature 1..6: note = RNA
  misc_feature 7: note = DNA
  misc_feature 8..36: note = RNA
  misc_feature 37: note = DNA
  misc_feature 38..48: note = RNA

SEQ ID NO: 59 - DNA, 48 bp, synthetic construct; identical to SEQ ID NO: 14
  source 1..48: mol_type = other DNA
  misc_difference 1: note = Any 2'-O-methyl nucleotide with a 3' phosphorothioate attached
  misc_difference 2: note = Any 2'-O-methyl nucleotide with a 3' phosphorothioate attached
  misc_difference 3: note = Any 2'-O-methyl nucleotide with a 3' phosphorothioate attached
  misc_difference 4: note = Any 2'-O-methyl nucleotide
  misc_difference 5: note = Any 2'-O-methyl nucleotide
  misc_difference 6: note = Any 2'-O-methyl nucleotide
  misc_difference 7: note = Any nucleotide with a 3' phosphorothioate attached
  misc_difference 8: note = Any 2'-O-methyl nucleotide
  misc_difference 9: note = Any 2'-O-methyl nucleotide
  misc_difference 10: note = Any 2'-O-methyl nucleotide
  misc_difference 11: note = Any 2'-O-methyl nucleotide
  misc_difference 12: note = Any 2'-fluoro nucleotide
  misc_difference 13: note = Any 2'-O-methyl nucleotide
  misc_difference 14: note = Any 2'-fluoro nucleotide
  misc_difference 15: note = Any 2'-O-methyl nucleotide
  misc_difference 16: note = Any 2'-fluoro nucleotide
  misc_difference 17: note = Any 2'-O-methyl nucleotide
  misc_difference 18: note = Any 2'-O-methyl nucleotide
  misc_difference 19: note = Any 2'-O-methyl nucleotide
  misc_difference 20: note = Any 2'-O-methyl nucleotide
  misc_difference 21: note = Any 2'-fluoro nucleotide
  misc_difference 22: note = Any 2'-O-methyl nucleotide
  misc_difference 23: note = Any 2'-O-methyl nucleotide
  misc_difference 24: note = Any 2'-O-methyl nucleotide
  modified_base 25: mod_base = OTHER; note = 2'-O-methyl guanosine
  modified_base 28: mod_base = OTHER; note = 2'-O-methyl guanosine
  modified_base 29: mod_base = OTHER; note = 2'-O-methyl uridine
  modified_base 30: mod_base = OTHER; note = 2'-O-methyl adenosine
  modified_base 31: mod_base = OTHER; note = 2'-O-methyl guanosine
  modified_base 32: mod_base = OTHER; note = 2'-O-methyl cytidine
  modified_base 33: mod_base = OTHER; note = Deoxythymidine phosphorothioate
  modified_base 36: mod_base = OTHER; note = Deoxycytidine phosphorothioate
  modified_base 38: mod_base = OTHER; note = 2'-O-methyl uridine
  modified_base 39: mod_base = OTHER; note = 2'-O-methyl uridine
  modified_base 40: mod_base = OTHER; note = 2'-O-methyl cytidine
  modified_base 41: mod_base = OTHER; note = 2'-O-methyl uridine
  modified_base 42: mod_base = OTHER; note = 2'-O-methyl cytidine
  modified_base 43: mod_base = OTHER; note = 2'-O-methyl adenosine
  modified_base 44: mod_base = OTHER; note = 2'-O-methyl uridine
  modified_base 45: mod_base = OTHER; note = 2'-O-methyl uridine phosphorothioate
  modified_base 46: mod_base = OTHER; note = 2'-O-methyl uridine phosphorothioate
  modified_base 47: mod_base = OTHER; note = 2'-O-methyl cytidine phosphorothioate
  modified_base 48: mod_base = OTHER; note = 2'-O-methyl guanosine
  misc_feature 1..6: note = RNA
  misc_feature 7: note = DNA
  misc_feature 8..32: note = RNA
  misc_feature 33: note = DNA
  misc_feature 34..35: note = RNA
  misc_feature 36: note = DNA
  misc_feature 37..48: note = RNA

SEQ ID NO: 60 - DNA, 48 bp, synthetic construct; identical to SEQ ID NO: 14
  source 1..48: mol_type = other DNA
  misc_difference 1: note = Any 2'-O-methyl nucleotide with a 3' phosphorothioate attached
  misc_difference 2: note = Any 2'-O-methyl nucleotide with a 3' phosphorothioate attached
  misc_difference 3: note = Any 2'-O-methyl nucleotide with a 3' phosphorothioate attached
  misc_difference 4: note = Any 2'-O-methyl nucleotide
  misc_difference 5: note = Any 2'-O-methyl nucleotide
  misc_difference 6: note = Any 2'-O-methyl nucleotide
  misc_difference 7: note = Any nucleotide with a 3' phosphorothioate attached
  misc_difference 8: note = Any 2'-O-methyl nucleotide
  misc_difference 9: note = Any 2'-O-methyl nucleotide
  misc_difference 10: note = Any 2'-O-methyl nucleotide
  misc_difference 11: note = Any 2'-O-methyl nucleotide
  misc_difference 12: note = Any 2'-fluoro nucleotide
  misc_difference 13: note = Any 2'-O-methyl nucleotide
  misc_difference 14: note = Any 2'-fluoro nucleotide
  misc_difference 15: note = Any 2'-O-methyl nucleotide
  misc_difference 16: note = Any 2'-fluoro nucleotide
  misc_difference 17: note = Any 2'-O-methyl nucleotide
  misc_difference 18: note = Any 2'-O-methyl nucleotide
  misc_difference 19: note = Any 2'-O-methyl nucleotide
  misc_difference 20: note = Any 2'-O-methyl nucleotide
  misc_difference 21: note = Any 2'-fluoro nucleotide
  misc_difference 22: note = Any 2'-O-methyl nucleotide
  misc_difference 23: note = Any 2'-O-methyl nucleotide
  misc_difference 24: note = Any 2'-O-methyl nucleotide
  modified_base 25: mod_base = OTHER; note = 2'-O-methyl guanosine
  modified_base 28: mod_base = OTHER; note = 2'-O-methyl guanosine
  modified_base 29: mod_base = OTHER; note = 2'-O-methyl uridine
  modified_base 30: mod_base = OTHER; note = 2'-O-methyl adenosine
  modified_base 31: mod_base = OTHER; note = 2'-O-methyl guanosine
  modified_base 32: mod_base = OTHER; note = 2'-O-methyl cytidine
  modified_base 33: mod_base = OTHER; note = Deoxythymidine phosphorothioate
  modified_base 35: mod_base = OTHER; note = Deoxycytidine phosphorothioate
  modified_base 38: mod_base = OTHER; note = 2'-O-methyl uridine
  modified_base 39: mod_base = OTHER; note = 2'-O-methyl uridine
  modified_base 40: mod_base = OTHER; note = 2'-O-methyl cytidine
  modified_base 41: mod_base = OTHER; note = 2'-O-methyl uridine
  modified_base 42: mod_base = OTHER; note = 2'-O-methyl cytidine
  modified_base 43: mod_base = OTHER; note = 2'-O-methyl adenosine
  modified_base 44: mod_base = OTHER; note = 2'-O-methyl uridine
  modified_base 45: mod_base = OTHER; note = 2'-O-methyl uridine phosphorothioate
  modified_base 46: mod_base = OTHER; note = 2'-O-methyl uridine phosphorothioate
  modified_base 47: mod_base = OTHER; note = 2'-O-methyl cytidine phosphorothioate
  modified_base 48: mod_base = OTHER; note = 2'-O-methyl guanosine
  misc_feature 1..6: note = RNA
  misc_feature 7: note = DNA
  misc_feature 8..32: note = RNA
  misc_feature 33: note = DNA
  misc_feature 34: note = RNA
  misc_feature 35: note = DNA
  misc_feature 36..48: note = RNA

SEQ ID NO: 61 - DNA, 48 bp, synthetic construct; identical to SEQ ID NO: 14
  source 1..48: mol_type = other DNA
  misc_difference 1: note = Any 2'-O-methyl nucleotide with a 3' phosphorothioate attached
  misc_difference 2: note = Any 2'-O-methyl nucleotide with a 3' phosphorothioate attached
  misc_difference 3: note = Any 2'-O-methyl nucleotide with a 3' phosphorothioate attached
  misc_difference 4: note = Any 2'-O-methyl nucleotide
  misc_difference 5: note = Any 2'-O-methyl nucleotide
  misc_difference 6: note = Any 2'-O-methyl nucleotide
  misc_difference 7: note = Any nucleotide with a 3' phosphorothioate attached
  misc_difference 8: note = Any 2'-O-methyl nucleotide
  misc_difference 9: note = Any 2'-O-methyl nucleotide
  misc_difference 10: note = Any 2'-O-methyl nucleotide
  misc_difference 11: note = Any 2'-O-methyl nucleotide
  misc_difference 12: note = Any 2'-fluoro nucleotide
  misc_difference 13: note = Any 2'-O-methyl nucleotide
  misc_difference 14: note = Any 2'-fluoro nucleotide
  misc_difference 15: note = Any 2'-O-methyl nucleotide
  misc_difference 16: note = Any 2'-fluoro nucleotide
  misc_difference 17: note = Any 2'-O-methyl nucleotide
  misc_difference 18: note = Any 2'-O-methyl nucleotide
  misc_difference 19: note = Any 2'-O-methyl nucleotide
  misc_difference 20: note = Any 2'-O-methyl nucleotide
  misc_difference 21: note = Any 2'-fluoro nucleotide
  misc_difference 22: note = Any 2'-O-methyl nucleotide
  misc_difference 23: note = Any 2'-O-methyl nucleotide
  misc_difference 24: note = Any 2'-O-methyl nucleotide
  modified_base 25: mod_base = OTHER; note = 2'-O-methyl guanosine
  modified_base 28: mod_base = OTHER; note = 2'-O-methyl guanosine
  modified_base 29: mod_base = OTHER; note = 2'-O-methyl uridine
  modified_base 30: mod_base = OTHER; note = 2'-O-methyl adenosine
  modified_base 31: mod_base = OTHER; note = 2'-O-methyl guanosine
  modified_base 32: mod_base = OTHER; note = 2'-O-methyl cytidine
  modified_base 33: mod_base = OTHER; note = Deoxythymidine phosphorothioate
  modified_base 37: mod_base = OTHER; note = Deoxythymidine phosphorothioate
  modified_base 38: mod_base = OTHER; note = 2'-O-methyl uridine
  modified_base 39: mod_base = OTHER; note = 2'-O-methyl uridine
  modified_base 40: mod_base = OTHER; note = 2'-O-methyl cytidine
  modified_base 41: mod_base = OTHER; note = 2'-O-methyl uridine
  modified_base 42: mod_base = OTHER; note = 2'-O-methyl cytidine
  modified_base 43: mod_base = OTHER; note = 2'-O-methyl adenosine
  modified_base 44: mod_base = OTHER; note = 2'-O-methyl uridine
  modified_base 45: mod_base = OTHER; note = 2'-O-methyl uridine phosphorothioate
  modified_base 46: mod_base = OTHER; note = 2'-O-methyl uridine phosphorothioate
  modified_base 47: mod_base = OTHER; note = 2'-O-methyl cytidine phosphorothioate
  modified_base 48: mod_base = OTHER; note = 2'-O-methyl guanosine
  misc_feature 1..6: note = RNA
  misc_feature 7: note = DNA
  misc_feature 8..32: note = RNA
  misc_feature 33: note = DNA
  misc_feature 34..36: note = RNA
  misc_feature 37: note = DNA
  misc_feature 38..48: note = RNA

SEQ ID NO: 62 - DNA, 48 bp, synthetic construct; identical to SEQ ID NO: 14
  source 1..48: mol_type = other DNA
  misc_difference 1: note = Any 2'-O-methyl nucleotide with a 3' phosphorothioate attached
  misc_difference 2: note = Any 2'-O-methyl nucleotide with a 3' phosphorothioate attached
  misc_difference 3: note = Any 2'-O-methyl nucleotide with a 3' phosphorothioate attached
  misc_difference 4: note = Any 2'-O-methyl nucleotide
  misc_difference 5: note = Any 2'-O-methyl nucleotide
  misc_difference 6: note = Any 2'-O-methyl nucleotide
  misc_difference 7: note = Any nucleotide with a 3' phosphorothioate attached
  misc_difference 8: note = Any 2'-O-methyl nucleotide
  misc_difference 9: note = Any 2'-O-methyl nucleotide
  misc_difference 10: note = Any 2'-O-methyl nucleotide
  misc_difference 11: note = Any 2'-O-methyl nucleotide
  misc_difference 12: note = Any 2'-fluoro nucleotide
  misc_difference 13: note = Any 2'-O-methyl nucleotide
  misc_difference 14: note = Any 2'-fluoro nucleotide
  misc_difference 15: note = Any 2'-O-methyl nucleotide
  misc_difference 16: note = Any 2'-fluoro nucleotide
  misc_difference 17: note = Any 2'-O-methyl nucleotide
  misc_difference 18: note = Any 2'-O-methyl nucleotide
  misc_difference 19: note = Any 2'-O-methyl nucleotide
  misc_difference 20: note = Any 2'-O-methyl nucleotide
  misc_difference 21: note = Any 2'-fluoro nucleotide
  misc_difference 22: note = Any 2'-O-methyl nucleotide
  misc_difference 23: note = Any 2'-O-methyl nucleotide
  misc_difference 24: note = Any 2'-O-methyl nucleotide
  modified_base 25: mod_base = OTHER; note = 2'-O-methyl guanosine
  modified_base 28: mod_base = OTHER; note = 2'-O-methyl guanosine
  modified_base 29: mod_base = OTHER; note = 2'-O-methyl uridine
  modified_base 30: mod_base = OTHER; note = 2'-O-methyl adenosine
  modified_base 31: mod_base = OTHER; note = 2'-O-methyl guanosine
  modified_base 32: mod_base = OTHER; note = 2'-O-methyl cytidine
  modified_base 33: mod_base = OTHER; note = Deoxythymidine phosphorothioate
  modified_base 35: mod_base = OTHER; note = 2'-O-methyl cytidine
  modified_base 38: mod_base = OTHER; note = 2'-O-methyl uridine
  modified_base 39: mod_base = OTHER; note = 2'-O-methyl uridine
  modified_base 40: mod_base = OTHER; note = 2'-O-methyl cytidine
  modified_base 41: mod_base = OTHER; note = 2'-O-methyl uridine
  modified_base 42: mod_base = OTHER; note = 2'-O-methyl cytidine
  modified_base 43: mod_base = OTHER; note = 2'-O-methyl adenosine
  modified_base 44: mod_base = OTHER; note = 2'-O-methyl uridine
  modified_base 45: mod_base = OTHER; note = 2'-O-methyl uridine phosphorothioate
  modified_base 46: mod_base = OTHER; note = 2'-O-methyl uridine phosphorothioate
  modified_base 47: mod_base = OTHER; note = 2'-O-methyl cytidine phosphorothioate
  modified_base 48: mod_base = OTHER; note = 2'-O-methyl guanosine
  misc_feature 1..6: note = RNA
  misc_feature 7: note = DNA
  misc_feature 8..32: note = RNA
  misc_feature 33: note = DNA
  misc_feature 34..48: note = RNA

SEQ ID NO: 63 - DNA, 48 bp, synthetic construct; identical to SEQ ID NO: 14
  source 1..48: mol_type = other DNA
  misc_difference 1: note = Any 2'-O-methyl nucleotide with a 3' phosphorothioate attached
  misc_difference 2: note = Any 2'-O-methyl nucleotide with a 3' phosphorothioate attached
  misc_difference 3: note = Any 2'-O-methyl nucleotide with a 3' phosphorothioate attached
  misc_difference 4: note = Any 2'-O-methyl nucleotide
  misc_difference 5: note = Any 2'-O-methyl nucleotide
  misc_difference 6: note = Any 2'-O-methyl nucleotide
  misc_difference 7: note = Any nucleotide with a 3' phosphorothioate attached
  misc_difference 8: note = Any 2'-O-methyl nucleotide
  misc_difference 9: note = Any 2'-O-methyl nucleotide
  misc_difference 10: note = Any 2'-O-methyl nucleotide
  misc_difference 11: note = Any 2'-O-methyl nucleotide
  misc_difference 12: note = Any 2'-fluoro nucleotide
  misc_difference 13: note = Any 2'-O-methyl nucleotide
  misc_difference 14: note = Any 2'-fluoro nucleotide
  misc_difference 15: note = Any 2'-O-methyl nucleotide
  misc_difference 16: note = Any 2'-fluoro nucleotide
  misc_difference 17: note = Any 2'-O-methyl nucleotide
  misc_difference 18: note = Any 2'-O-methyl nucleotide
  misc_difference 19: note = Any 2'-O-methyl nucleotide
  misc_difference 20: note = Any 2'-O-methyl nucleotide
  misc_difference 21: note = Any 2'-fluoro nucleotide
  misc_difference 22: note = Any 2'-O-methyl nucleotide
  misc_difference 23: note = Any 2'-O-methyl nucleotide
  misc_difference 24: note = Any 2'-O-methyl nucleotide
  modified_base 25: mod_base = OTHER; note = 2'-O-methyl guanosine
  modified_base 28: mod_base = OTHER; note = 2'-O-methyl guanosine
  modified_base 29: mod_base = OTHER; note = 2'-O-methyl uridine
  modified_base 30: mod_base = OTHER; note = 2'-O-methyl adenosine
  modified_base 31: mod_base = OTHER; note = 2'-O-methyl guanosine
  modified_base 32: mod_base = OTHER; note = 2'-O-methyl cytidine
  modified_base 33: mod_base = OTHER; note = Deoxythymidine phosphorothioate
  modified_base 35: mod_base = OTHER; note = Deoxycytidine phosphorothioate
  modified_base 36: mod_base = OTHER; note = Deoxycytidine phosphorothioate
  modified_base 38: mod_base = OTHER; note = 2'-O-methyl uridine
  modified_base 39: mod_base = OTHER; note = 2'-O-methyl uridine
  modified_base 40: mod_base = OTHER; note = 2'-O-methyl cytidine
  modified_base 41: mod_base = OTHER; note = 2'-O-methyl uridine
  modified_base 42: mod_base = OTHER; note = 2'-O-methyl cytidine
  modified_base 43: mod_base = OTHER; note = 2'-O-methyl adenosine
  modified_base 44: mod_base = OTHER; note = 2'-O-methyl uridine
  modified_base 45: mod_base = OTHER; note = 2'-O-methyl uridine phosphorothioate
  modified_base 46: mod_base = OTHER; note = 2'-O-methyl uridine phosphorothioate
  modified_base 47: mod_base = OTHER; note = 2'-O-methyl cytidine phosphorothioate
  modified_base 48: mod_base = OTHER; note = 2'-O-methyl guanosine
  misc_feature 1..6: note = RNA
  misc_feature 7: note = DNA
  misc_feature 8..32: note = RNA
  misc_feature 33: note = DNA
  misc_feature 34: note = RNA
  misc_feature 35..36: note = DNA
  misc_feature 37..48: note = RNA

SEQ ID NO: 64 - DNA, 48 bp, synthetic construct; identical to SEQ ID NO: 14
  source 1..48: mol_type = other DNA
  misc_difference 1: note = Any 2'-O-methyl nucleotide with a 3' phosphorothioate attached
  misc_difference 2: note = Any 2'-O-methyl nucleotide with a 3' phosphorothioate attached
  misc_difference 3: note = Any 2'-O-methyl nucleotide with a 3' phosphorothioate attached
  misc_difference 4: note = Any 2'-O-methyl nucleotide
  misc_difference 5: note = Any 2'-O-methyl nucleotide
  misc_difference 6: note = Any 2'-O-methyl nucleotide
  misc_difference 7: note = Any nucleotide with a 3' phosphorothioate attached
  misc_difference 8: note = Any 2'-O-methyl nucleotide
  misc_difference 9: note = Any 2'-O-methyl nucleotide
  misc_difference 10: note = Any 2'-O-methyl nucleotide
  misc_difference 11: note = Any 2'-O-methyl nucleotide
  misc_difference 12: note = Any 2'-fluoro nucleotide
  misc_difference 13: note = Any 2'-O-methyl nucleotide
  misc_difference 14: note = Any 2'-fluoro nucleotide
  misc_difference 15: note = Any 2'-O-methyl nucleotide
  misc_difference 16: note = Any 2'-fluoro nucleotide
  misc_difference 17: note = Any 2'-O-methyl nucleotide
  misc_difference 18: note = Any 2'-O-methyl nucleotide
  misc_difference 19: note = Any 2'-O-methyl nucleotide
  misc_difference 20: note = Any 2'-O-methyl nucleotide
  misc_difference 21: note = Any 2'-fluoro nucleotide
  misc_difference 22: note = Any 2'-O-methyl nucleotide
  misc_difference 23: note = Any 2'-O-methyl nucleotide
  misc_difference 24: note = Any 2'-O-methyl nucleotide
  modified_base 25: mod_base = OTHER; note = 2'-O-methyl guanosine
  modified_base 28: mod_base = OTHER; note = 2'-O-methyl guanosine
  modified_base 29: mod_base = OTHER; note = 2'-O-methyl uridine
  modified_base 30: mod_base = OTHER; note = 2'-O-methyl adenosine
  modified_base 31: mod_base = OTHER; note = 2'-O-methyl guanosine
  modified_base 32: mod_base = OTHER; note = 2'-O-methyl cytidine
  modified_base 33: mod_base = OTHER; note = Deoxythymidine phosphorothioate
  modified_base 35: mod_base = OTHER; note = Deoxycytidine phosphorothioate
  modified_base 37: mod_base = OTHER; note = Deoxythymidine phosphorothioate
  modified_base 38: mod_base = OTHER; note = 2'-O-methyl uridine
  modified_base 39: mod_base = OTHER; note = 2'-O-methyl uridine
  modified_base 40: mod_base = OTHER; note = 2'-O-methyl cytidine
  modified_base 41: mod_base = OTHER; note = 2'-O-methyl uridine
  modified_base 42: mod_base = OTHER; note = 2'-O-methyl cytidine
  modified_base 43: mod_base = OTHER; note = 2'-O-methyl adenosine
  modified_base 44: mod_base = OTHER; note = 2'-O-methyl uridine
  modified_base 45: mod_base = OTHER; note = 2'-O-methyl uridine phosphorothioate
  modified_base 46: mod_base = OTHER; note = 2'-O-methyl uridine phosphorothioate
  modified_base 47: mod_base = OTHER; note = 2'-O-methyl cytidine phosphorothioate
  modified_base 48: mod_base = OTHER; note = 2'-O-methyl guanosine
  misc_feature 1..6: note = RNA
  misc_feature 7: note = DNA
  misc_feature 8..32: note = RNA
  misc_feature 33: note = DNA
  misc_feature 34: note = RNA
  misc_feature 35: note = DNA
  misc_feature 36: note = RNA
  misc_feature 37: note = DNA
  misc_feature 38..48: note = RNA

SEQ ID NO: 65 - DNA, 48 bp, synthetic construct; identical to SEQ ID NO: 14
  source 1..48: mol_type = other DNA
  misc_difference 1: note = Any 2'-O-methyl nucleotide with a 3' phosphorothioate attached
  misc_difference 2: note = Any 2'-O-methyl nucleotide with a 3' phosphorothioate attached
  misc_difference 3: note = Any 2'-O-methyl nucleotide with a 3' phosphorothioate attached
  misc_difference 4: note = Any 2'-O-methyl nucleotide
  misc_difference 5: note = Any 2'-O-methyl nucleotide
  misc_difference 6: note = Any 2'-O-methyl nucleotide
  misc_difference 7: note = Any nucleotide with a 3' phosphorothioate attached
  misc_difference 8: note = Any 2'-O-methyl nucleotide
  misc_difference 9: note = Any 2'-O-methyl nucleotide
  misc_difference 10: note = Any 2'-O-methyl nucleotide
  misc_difference 11: note = Any 2'-O-methyl nucleotide
  misc_difference 12: note = Any 2'-fluoro nucleotide
  misc_difference 13: note = Any 2'-O-methyl nucleotide
  misc_difference 14: note = Any 2'-fluoro nucleotide
  misc_difference 15: note = Any 2'-O-methyl nucleotide
  misc_difference 16: note = Any 2'-fluoro nucleotide
  misc_difference 17: note = Any 2'-O-methyl nucleotide
  misc_difference 18: note = Any 2'-O-methyl nucleotide
  misc_difference 19: note = Any 2'-O-methyl nucleotide
  misc_difference 20: note = Any 2'-O-methyl nucleotide
  misc_difference 21: note = Any 2'-fluoro nucleotide
  misc_difference 22: note = Any 2'-O-methyl nucleotide
  misc_difference 23: note = Any 2'-O-methyl nucleotide
  misc_difference 24: note = Any 2'-O-methyl nucleotide
  modified_base 25: mod_base = OTHER; note = 2'-O-methyl guanosine
  modified_base 28: mod_base = OTHER; note = 2'-O-methyl guanosine
  modified_base 29: mod_base = OTHER; note = 2'-O-methyl uridine
  modified_base 30: mod_base = OTHER; note = 2'-O-methyl adenosine
  modified_base 31: mod_base = OTHER; note = 2'-O-methyl guanosine
  modified_base 32: mod_base = OTHER; note = 2'-O-methyl cytidine
  modified_base 33: mod_base = OTHER; note = Deoxythymidine phosphorothioate
  modified_base 35: mod_base = OTHER; note = Deoxycytidine phosphorothioate
  modified_base 36: mod_base = OTHER; note = Deoxycytidine phosphorothioate
  modified_base 37: mod_base = OTHER; note = Deoxythymidine phosphorothioate
  modified_base 38: mod_base = OTHER; note = 2'-O-methyl uridine
  modified_base 39: mod_base = OTHER; note = 2'-O-methyl uridine
  modified_base 40: mod_base = OTHER; note = 2'-O-methyl cytidine
  modified_base 41: mod_base = OTHER; note = 2'-O-methyl uridine
  modified_base 42: mod_base = OTHER; note = 2'-O-methyl cytidine
  modified_base 43: mod_base = OTHER; note = 2'-O-methyl adenosine
  modified_base 44: mod_base = OTHER; note = 2'-O-methyl uridine
  modified_base 45: mod_base = OTHER; note = 2'-O-methyl uridine phosphorothioate
  modified_base 46: mod_base = OTHER; note = 2'-O-methyl uridine phosphorothioate
  modified_base 47: mod_base = OTHER; note = 2'-O-methyl cytidine phosphorothioate
  modified_base 48: mod_base = OTHER; note = 2'-O-methyl guanosine
  misc_feature 1..6: note = RNA
  misc_feature 7: note = DNA
  misc_feature 8..32: note = RNA
  misc_feature 33: note = DNA
  misc_feature 34: note = RNA
  misc_feature 35..37: note = DNA
  misc_feature 38..48: note = RNA

SEQ ID NO: 66 - DNA, 48 bp, synthetic construct; identical to SEQ ID NO: 14
  source 1..48: mol_type = other DNA
  misc_difference 1: note = Any 2'-O-methyl nucleotide with a 3' phosphorothioate attached
  misc_difference 2: note = Any 2'-O-methyl nucleotide with a 3' phosphorothioate attached
  misc_difference 3: note = Any 2'-O-methyl nucleotide with a 3' phosphorothioate attached
  misc_difference 4: note = Any 2'-O-methyl nucleotide
  misc_difference 5: note = Any 2'-O-methyl nucleotide
  misc_difference 6: note = Any 2'-O-methyl nucleotide
  misc_difference 7: note = Any nucleotide with a 3' phosphorothioate attached
  misc_difference 8: note = Any 2'-O-methyl nucleotide
  misc_difference 9: note = Any 2'-O-methyl nucleotide
  misc_difference 10: note = Any 2'-O-methyl nucleotide
  misc_difference 11: note = Any 2'-O-methyl nucleotide
  misc_difference 12: note = Any 2'-fluoro nucleotide
  misc_difference 13: note = Any 2'-O-methyl nucleotide
  misc_difference 14: note = Any 2'-fluoro nucleotide
  misc_difference 15: note = Any 2'-O-methyl nucleotide
  misc_difference 16: note = Any 2'-fluoro nucleotide
  misc_difference 17: note = Any 2'-O-methyl nucleotide
  misc_difference 18: note = Any 2'-O-methyl nucleotide
  misc_difference 19: note = Any 2'-O-methyl nucleotide
  misc_difference 20: note = Any 2'-O-methyl nucleotide
  misc_difference 21: note = Any 2'-fluoro nucleotide
  misc_difference 22: note = Any 2'-O-methyl nucleotide
  misc_difference 23: note = Any 2'-O-methyl nucleotide
  misc_difference 24: note = Any 2'-O-methyl nucleotide
  modified_base 25: mod_base = OTHER; note = 2'-O-methyl guanosine
  modified_base 28: mod_base = OTHER; note = 2'-O-methyl guanosine
  modified_base 29: mod_base = OTHER; note = 2'-O-methyl uridine
  modified_base 30: mod_base = OTHER; note = 2'-O-methyl adenosine
  modified_base 31: mod_base = OTHER; note = 2'-O-methyl guanosine
  modified_base 32: mod_base = OTHER; note = 2'-O-methyl cytidine
  modified_base 33: mod_base = OTHER; note = Deoxythymidine phosphorothioate
  modified_base 35: mod_base = OTHER; note = 2'-O-methyl cytidine
  modified_base 36: mod_base = OTHER; note = Deoxycytidine phosphorothioate
  modified_base 38: mod_base = OTHER; note = 2'-O-methyl uridine
  modified_base 39: mod_base = OTHER; note = 2'-O-methyl uridine
  modified_base 40: mod_base = OTHER; note = 2'-O-methyl cytidine
  modified_base 41: mod_base = OTHER; note = 2'-O-methyl uridine
  modified_base 42: mod_base = OTHER; note = 2'-O-methyl cytidine
  modified_base 43: mod_base = OTHER; note = 2'-O-methyl adenosine
  modified_base 44: mod_base = OTHER; note = 2'-O-methyl uridine
  modified_base 45: mod_base = OTHER; note = 2'-O-methyl uridine phosphorothioate
  modified_base 46: mod_base = OTHER; note = 2'-O-methyl uridine phosphorothioate
  modified_base 47: mod_base = OTHER; note = 2'-O-methyl cytidine phosphorothioate
  modified_base 48: mod_base = OTHER; note = 2'-O-methyl guanosine
  misc_feature 1..6: note = RNA
  misc_feature 7: note = DNA
  misc_feature 8..32: note = RNA
  misc_feature 33: note = DNA
  misc_feature 34..35: note = RNA
  misc_feature 36: note = DNA
  misc_feature 37..48: note = RNA

SEQ ID NO: 67 - DNA, 48 bp, synthetic construct; identical to SEQ ID NO: 14
  source 1..48: mol_type = other DNA
  misc_difference 1: note = Any 2'-O-methyl nucleotide with a 3' phosphorothioate attached
  misc_difference 2: note = Any 2'-O-methyl nucleotide with a 3' phosphorothioate attached
  misc_difference 3: note = Any 2'-O-methyl nucleotide with a 3' phosphorothioate attached
  misc_difference 4: note = Any 2'-O-methyl nucleotide
  misc_difference 5: note = Any 2'-O-methyl nucleotide
  misc_difference 6: note = Any 2'-O-methyl nucleotide
  misc_difference 7: note = Any nucleotide with a 3' phosphorothioate attached
  misc_difference 8: note = Any 2'-O-methyl nucleotide
  misc_difference 9: note = Any 2'-O-methyl nucleotide
  misc_difference 10: note = Any 2'-O-methyl nucleotide
  misc_difference 11: note = Any 2'-O-methyl nucleotide
  misc_difference 12: note = Any 2'-fluoro nucleotide
  misc_difference 13: note = Any 2'-O-methyl nucleotide
  misc_difference 14: note = Any 2'-fluoro nucleotide
  misc_difference 15: note = Any 2'-O-methyl nucleotide
  misc_difference 16: note = Any 2'-fluoro nucleotide
  misc_difference 17: note = Any 2'-O-methyl nucleotide
  misc_difference 18: note = Any 2'-O-methyl nucleotide
  misc_difference 19: note = Any 2'-O-methyl nucleotide
  misc_difference 20: note = Any 2'-O-methyl nucleotide
  misc_difference 21: note = Any 2'-fluoro nucleotide
  misc_difference 22: note = Any 2'-O-methyl nucleotide
  misc_difference 23: note = Any 2'-O-methyl nucleotide
  misc_difference 24: note = Any 2'-O-methyl nucleotide
  modified_base 25: mod_base = OTHER; note = 2'-O-methyl guanosine
  modified_base 28: mod_base = OTHER; note = 2'-O-methyl guanosine
  modified_base 29: mod_base = OTHER; note = 2'-O-methyl uridine
  modified_base 30: mod_base = OTHER; note = 2'-O-methyl adenosine
  modified_base 31: mod_base = OTHER; note = 2'-O-methyl guanosine
  modified_base 32: mod_base = OTHER; note = 2'-O-methyl cytidine
  modified_base 33: mod_base = OTHER; note = Deoxythymidine phosphorothioate
  modified_base 35: mod_base = OTHER; note = 2'-O-methyl cytidine
  modified_base 37: mod_base = OTHER; note = Deoxythymidine phosphorothioate
  modified_base 38: mod_base = OTHER; note = 2'-O-methyl uridine
  modified_base 39: mod_base = OTHER; note = 2'-O-methyl uridine
  modified_base 40: mod_base = OTHER; note = 2'-O-methyl cytidine
  modified_base 41: mod_base = OTHER; note = 2'-O-methyl uridine
  modified_base 42: mod_base = OTHER; note = 2'-O-methyl cytidine
  modified_base 43: mod_base = OTHER; note = 2'-O-methyl adenosine
  modified_base 44: mod_base = OTHER; note = 2'-O-methyl uridine
  modified_base 45: mod_base = OTHER; note = 2'-O-methyl uridine phosphorothioate
  modified_base 46: mod_base = OTHER; note = 2'-O-methyl uridine phosphorothioate
  modified_base 47: mod_base = OTHER; note = 2'-O-methyl cytidine phosphorothioate
  modified_base 48: mod_base = OTHER; note = 2'-O-methyl guanosine
  misc_feature 1..6: note = RNA
  misc_feature 7: note = DNA
  misc_feature 8..32: note = RNA
  misc_feature 33: note = DNA
  misc_feature 34..36: note = RNA
  misc_feature 37: note = DNA
  misc_feature 38..48: note = RNA

SEQ ID NO: 68 - DNA, 48 bp, synthetic construct; identical to SEQ ID NO: 14
  source 1..48: mol_type = other DNA
  misc_difference 1: note = Any 2'-O-methyl nucleotide with a 3' phosphorothioate attached
  misc_difference 2: note = Any 2'-O-methyl nucleotide with a 3' phosphorothioate attached
  misc_difference 3: note = Any 2'-O-methyl nucleotide with a 3' phosphorothioate attached
  misc_difference 4: note = Any 2'-O-methyl nucleotide
  misc_difference 5: note = Any 2'-O-methyl nucleotide
  misc_difference 6: note = Any 2'-O-methyl nucleotide
  misc_difference 7: note = Any nucleotide with a 3' phosphorothioate attached
  misc_difference 8: note = Any 2'-O-methyl nucleotide
  misc_difference 9: note = Any 2'-O-methyl nucleotide
  misc_difference 10: note = Any 2'-O-methyl nucleotide
  misc_difference 11: note = Any 2'-O-methyl nucleotide
  misc_difference 12: note = Any 2'-fluoro nucleotide
  misc_difference 13: note = Any 2'-O-methyl nucleotide
  misc_difference 14: note = Any 2'-fluoro nucleotide
  misc_difference 15: note = Any 2'-O-methyl nucleotide
  misc_difference 16: note = Any 2'-fluoro nucleotide
  misc_difference 17: note = Any 2'-O-methyl nucleotide
  misc_difference 18: note = Any 2'-O-methyl nucleotide
  misc_difference 19: note = Any 2'-O-methyl nucleotide
  misc_difference 20: note = Any 2'-O-methyl nucleotide
  misc_difference 21: note = Any 2'-fluoro nucleotide
  misc_difference 22: note = Any 2'-O-methyl nucleotide
  misc_difference 23: note = Any 2'-O-methyl nucleotide
  misc_difference 24: note = Any 2'-O-methyl nucleotide
  modified_base 25: mod_base = OTHER; note = 2'-O-methyl guanosine
  modified_base 28: mod_base = OTHER; note = 2'-O-methyl guanosine
  modified_base 29: mod_base = OTHER; note = 2'-O-methyl uridine
  modified_base 30: mod_base = OTHER; note = 2'-O-methyl adenosine
  modified_base 31: mod_base = OTHER; note = 2'-O-methyl guanosine
  modified_base 32: mod_base = OTHER; note = 2'-O-methyl cytidine
  modified_base 33: mod_base = OTHER; note = Deoxythymidine phosphorothioate
  modified_base 35: mod_base = OTHER; note = 2'-O-methyl cytidine
  modified_base 36: mod_base = OTHER; note = Deoxycytidine phosphorothioate
  modified_base 37: mod_base = OTHER; note = Deoxythymidine phosphorothioate
  modified_base 38: mod_base = OTHER; note = 2'-O-methyl uridine
  modified_base 39: mod_base = OTHER; note = 2'-O-methyl uridine
  modified_base 40: mod_base = OTHER; note = 2'-O-methyl cytidine
  modified_base 41: mod_base = OTHER; note = 2'-O-methyl uridine
  modified_base 42: mod_base = OTHER; note = 2'-O-methyl cytidine
  modified_base 43: mod_base = OTHER; note = 2'-O-methyl adenosine
  modified_base 44: mod_base = OTHER; note = 2'-O-methyl uridine
  modified_base 45: mod_base = OTHER; note = 2'-O-methyl uridine phosphorothioate
  modified_base 46: mod_base = OTHER; note = 2'-O-methyl uridine phosphorothioate
  modified_base 47: mod_base = OTHER; note = 2'-O-methyl cytidine phosphorothioate
  modified_base 48: mod_base = OTHER; note = 2'-O-methyl guanosine
  misc_feature 1..6: note = RNA
  misc_feature 7: note = DNA
  misc_feature 8..32: note = RNA
  misc_feature 33: note = DNA
  misc_feature 34..35: note = RNA
  misc_feature 36..37: note = DNA
  misc_feature 38..48: note = RNA

SEQ ID NO: 69 - DNA, 48 bp, synthetic construct; identical to SEQ ID NO: 14
  source 1..48: mol_type = other DNA
  misc_difference 1: note = Any 2'-O-methyl nucleotide with a 3' phosphorothioate attached
  misc_difference 2: note = Any 2'-O-methyl nucleotide with a 3' phosphorothioate attached
  misc_difference 3: note = Any 2'-O-methyl nucleotide with a 3' phosphorothioate attached
  misc_difference 4: note = Any 2'-O-methyl nucleotide
  misc_difference 5: note = Any 2'-O-methyl nucleotide
  misc_difference 6: note = Any 2'-O-methyl nucleotide
  misc_difference 7: note = Any nucleotide with a 3' phosphorothioate attached
  misc_difference 8: note = Any 2'-O-methyl nucleotide
  misc_difference 9: note = Any 2'-O-methyl nucleotide
  misc_difference 10: note = Any 2'-O-methyl nucleotide
  misc_difference 11: note = Any 2'-O-methyl nucleotide
  misc_difference 12: note = Any 2'-fluoro nucleotide
  misc_difference 13: note = Any 2'-O-methyl nucleotide
  misc_difference 14: note = Any 2'-fluoro nucleotide
  misc_difference 15: note = Any 2'-O-methyl nucleotide
  misc_difference 16: note = Any 2'-fluoro nucleotide
  misc_difference 17: note = Any 2'-O-methyl nucleotide
  misc_difference 18: note = Any 2'-O-methyl nucleotide
  misc_difference 19: note = Any 2'-O-methyl nucleotide
  misc_difference 20: note = Any 2'-O-methyl nucleotide
  misc_difference 21: note = Any 2'-fluoro nucleotide
  misc_difference 22: note = Any 2'-O-methyl nucleotide
  misc_difference 23: note = Any 2'-O-methyl nucleotide
  misc_difference 24: note = Any 2'-O-methyl nucleotide
  modified_base 25: mod_base = OTHER; note = 2'-O-methyl guanosine
  modified_base 28: mod_base = OTHER; note = 2'-O-methyl guanosine
  modified_base 29: mod_base = OTHER; note = 2'-O-methyl uridine
  modified_base 30: mod_base = OTHER; note = 2'-O-methyl adenosine
  modified_base 31: mod_base = OTHER; note = 2'-O-methyl guanosine
  modified_base 32: mod_base = OTHER; note = 2'-O-methyl cytidine
  modified_base 33: mod_base = OTHER; note = Deoxythymidine phosphorothioate
  modified_base 35: mod_base = OTHER; note = 2'-O-methyl cytidine
  modified_base 36: mod_base = OTHER; note = 2'-O-methyl cytidine
  modified_base 38: mod_base = OTHER; note = 2'-O-methyl uridine
  modified_base 39: mod_base = OTHER; note = 2'-O-methyl uridine
  modified_base 40: mod_base = OTHER; note = 2'-O-methyl cytidine
  modified_base 41: mod_base = OTHER; note = 2'-O-methyl uridine
  modified_base 42: mod_base = OTHER; note = 2'-O-methyl cytidine
  modified_base 43: mod_base = OTHER; note = 2'-O-methyl adenosine
  modified_base 44: mod_base = OTHER; note = 2'-O-methyl uridine
  modified_base 45: mod_base = OTHER; note = 2'-O-methyl uridine phosphorothioate
  modified_base 46: mod_base = OTHER; note = 2'-O-methyl uridine phosphorothioate
  modified_base 47: mod_base = OTHER; note = 2'-O-methyl cytidine phosphorothioate
  modified_base 48: mod_base = OTHER; note = 2'-O-methyl guanosine
  misc_feature 1..6: note = RNA
  misc_feature 7: note = DNA
  misc_feature 8..32: note = RNA
  misc_feature 33: note = DNA
  misc_feature 34..48: note = RNA

SEQ ID NO: 70 - DNA, 48 bp, synthetic construct; identical to SEQ ID NO: 14
  source 1..48: mol_type = other DNA
  misc_difference 1: note = Any 2'-O-methyl nucleotide with a 3' phosphorothioate attached
  misc_difference 2: note = Any 2'-O-methyl nucleotide with a 3' phosphorothioate attached
  misc_difference 3: note = Any 2'-O-methyl nucleotide with a 3' phosphorothioate attached
  misc_difference 4: note = Any 2'-O-methyl nucleotide
  misc_difference 5: note = Any 2'-O-methyl nucleotide
  misc_difference 6: note = Any 2'-O-methyl nucleotide
  misc_difference 7: note = Any nucleotide with a 3' phosphorothioate attached
  misc_difference 8: note = Any 2'-O-methyl nucleotide
  misc_difference 9: note = Any 2'-O-methyl nucleotide
  misc_difference 10: note = Any 2'-O-methyl nucleotide
  misc_difference 11: note = Any 2'-O-methyl nucleotide
  misc_difference 12: note = Any 2'-fluoro nucleotide
  misc_difference 13: note = Any 2'-O-methyl nucleotide
  misc_difference 14: note = Any 2'-fluoro nucleotide
  misc_difference 15: note = Any 2'-O-methyl nucleotide
  misc_difference 16: note = Any 2'-fluoro nucleotide
  misc_difference 17: note = Any 2'-O-methyl nucleotide
  misc_difference 18: note = Any 2'-O-methyl nucleotide
  misc_difference 19: note = Any 2'-O-methyl nucleotide
  misc_difference 20: note = Any 2'-O-methyl nucleotide
  misc_difference 21: note = Any 2'-fluoro nucleotide
  misc_difference 22: note = Any 2'-O-methyl nucleotide
  misc_difference 23: note = Any 2'-O-methyl nucleotide
  misc_difference 24: note = Any 2'-O-methyl nucleotide
  modified_base 25: mod_base = OTHER; note = 2'-O-methyl guanosine
  modified_base 28: mod_base = OTHER; note = 2'-O-methyl guanosine
  modified_base 29: mod_base = OTHER; note = 2'-O-methyl uridine
  modified_base 30: mod_base = OTHER; note = 2'-O-methyl adenosine
  modified_base 31: mod_base = OTHER; note = 2'-O-methyl guanosine
  modified_base 32: mod_base = OTHER; note = 2'-O-methyl cytidine
  modified_base 33: mod_base = OTHER; note = Deoxythymidine phosphorothioate
  modified_base 35: mod_base = OTHER; note = 2'-O-methyl cytidine
  modified_base 36: mod_base = OTHER; note = 2'-O-methyl cytidine
  modified_base 37: mod_base = OTHER; note = Deoxythymidine phosphorothioate
  modified_base 38: mod_base = OTHER; note = 2'-O-methyl uridine
  modified_base 39: mod_base = OTHER; note = 2'-O-methyl uridine
  modified_base 40: mod_base = OTHER; note = 2'-O-methyl cytidine
  modified_base 41: mod_base = OTHER; note = 2'-O-methyl uridine
  modified_base 42: mod_base = OTHER; note = 2'-O-methyl cytidine
  modified_base 43: mod_base = OTHER; note = 2'-O-methyl adenosine
  modified_base 44: mod_base = OTHER; note = 2'-O-methyl uridine
  modified_base 45: mod_base = OTHER; note = 2'-O-methyl uridine phosphorothioate
  modified_base 46: mod_base = OTHER; note = 2'-O-methyl uridine phosphorothioate
  modified_base 47: mod_base = OTHER; note = 2'-O-methyl cytidine phosphorothioate
  modified_base 48: mod_base = OTHER; note = 2'-O-methyl guanosine
  misc_feature 1..6: note = RNA
  misc_feature 7: note = DNA
  misc_feature 8..32: note = RNA
  misc_feature 33: note = DNA
  misc_feature 34..36: note = RNA
  misc_feature 37: note = DNA
  misc_feature 38..48: note = RNA

SEQ ID NO: 71 - DNA, 48 bp, synthetic construct; identical to SEQ ID NO: 14
  source 1..48: mol_type = other DNA
  misc_difference 1: note = Any 2'-O-methyl nucleotide with a 3' phosphorothioate attached
  misc_difference 2: note = Any 2'-O-methyl nucleotide with a 3' phosphorothioate attached
  misc_difference 3: note = Any 2'-O-methyl nucleotide with a 3' phosphorothioate attached
  misc_difference 4: note = Any 2'-O-methyl nucleotide
  misc_difference 5: note = Any 2'-O-methyl nucleotide
  misc_difference 6: note = Any 2'-O-methyl nucleotide
  misc_difference 7: note = Any nucleotide with a 3' phosphorothioate attached
  misc_difference 8: note = Any 2'-O-methyl nucleotide
  misc_difference 9: note = Any 2'-O-methyl nucleotide
  misc_difference 10: note = Any 2'-O-methyl nucleotide
  misc_difference 11: note = Any 2'-O-methyl nucleotide
  misc_difference 12: note = Any 2'-fluoro nucleotide
  misc_difference 13: note = Any 2'-O-methyl nucleotide
  misc_difference 14: note = Any 2'-fluoro nucleotide
  misc_difference 15: note = Any 2'-O-methyl nucleotide
  misc_difference 16: note = Any 2'-fluoro nucleotide
  misc_difference 17: note = Any 2'-O-methyl nucleotide
  misc_difference 18: note = Any 2'-O-methyl nucleotide
  misc_difference 19: note = Any 2'-O-methyl nucleotide
  misc_difference 20: note = Any 2'-O-methyl nucleotide
  misc_difference 21: note = Any 2'-fluoro nucleotide
  misc_difference 22: note = Any 2'-O-methyl nucleotide
  misc_difference 23: note = Any 2'-O-methyl nucleotide
  misc_difference 24: note = Any 2'-O-methyl nucleotide
  modified_base 25: mod_base = OTHER; note = 2'-O-methyl guanosine
  modified_base 26: mod_base = OTHER; note = Deoxythymidine phosphorothioate
  modified_base 28: mod_base = OTHER; note = 2'-O-methyl guanosine
  modified_base 29: mod_base = OTHER; note = 2'-O-methyl uridine
  modified_base 30: mod_base = OTHER; note = 2'-O-methyl adenosine
  modified_base 31: mod_base = OTHER; note = 2'-O-methyl guanosine
  modified_base 32: mod_base = OTHER; note = 2'-O-methyl cytidine
  modified_base 33: mod_base = OTHER; note = Deoxythymidine phosphorothioate
  modified_base 36: mod_base = OTHER; note = Deoxycytidine phosphorothioate
  modified_base 38: mod_base = OTHER; note = 2'-O-methyl uridine
  modified_base 39: mod_base = OTHER; note = 2'-O-methyl uridine
  modified_base 40: mod_base = OTHER; note = 2'-O-methyl cytidine
  modified_base 41: mod_base = OTHER; note = 2'-O-methyl uridine
  modified_base 42: mod_base = OTHER; note = 2'-O-methyl cytidine
  modified_base 43: mod_base = OTHER; note = 2'-O-methyl adenosine
  modified_base 44: mod_base = OTHER; note = 2'-O-methyl uridine
  modified_base 45: mod_base = OTHER; note = 2'-O-methyl uridine phosphorothioate
  modified_base 46: mod_base = OTHER; note = 2'-O-methyl uridine phosphorothioate
  modified_base 47: mod_base = OTHER; note = 2'-O-methyl cytidine phosphorothioate
  modified_base 48: mod_base = OTHER; note = 2'-O-methyl guanosine
  misc_feature 1..6: note = RNA
  misc_feature 7: note = DNA
  misc_feature 8..25: note = RNA
  misc_feature 26: note = DNA
  misc_feature 27..32: note = RNA
  misc_feature 33: note = DNA
  misc_feature 34..35: note = RNA
  misc_feature 36: note = DNA
  misc_feature 37..48: note = RNA

SEQ ID NO: 72 - DNA, 48 bp, synthetic construct; identical to SEQ ID NO: 14
  source 1..48: mol_type = other DNA
  misc_difference 1: note = Any 2'-O-methyl nucleotide with a 3' phosphorothioate attached
  misc_difference 2: note = Any 2'-O-methyl nucleotide with a 3' phosphorothioate attached
  misc_difference 3: note = Any 2'-O-methyl nucleotide with a 3' phosphorothioate attached
  misc_difference 4: note = Any 2'-O-methyl nucleotide
  misc_difference 5: note = Any 2'-O-methyl nucleotide
  misc_difference 6: note = Any 2'-O-methyl nucleotide
  misc_difference 7: note = Any nucleotide with a 3' phosphorothioate attached
  misc_difference 8: note = Any 2'-O-methyl nucleotide
  misc_difference 9: note = Any 2'-O-methyl nucleotide
  misc_difference 10: note = Any 2'-O-methyl nucleotide
  misc_difference 11: note = Any 2'-O-methyl nucleotide
  misc_difference 12: note = Any 2'-fluoro nucleotide
  misc_difference 13: note = Any 2'-O-methyl nucleotide
  misc_difference 14: note = Any 2'-fluoro nucleotide
  misc_difference 15: note = Any 2'-O-methyl nucleotide
  misc_difference 16: note = Any 2'-fluoro nucleotide
  misc_difference 17: note = Any 2'-O-methyl nucleotide
  misc_difference 18: note = Any 2'-O-methyl nucleotide
  misc_difference 19: note = Any 2'-O-methyl nucleotide
  misc_difference 20: note = Any 2'-O-methyl nucleotide
  misc_difference 21: note = Any 2'-fluoro nucleotide
  misc_difference 22: note = Any 2'-O-methyl nucleotide
  misc_difference 23: note = Any 2'-O-methyl nucleotide
  misc_difference 24: note = Any 2'-O-methyl nucleotide
  modified_base 25: mod_base = OTHER; note = 2'-O-methyl guanosine
  modified_base 26: mod_base = OTHER; note = Deoxythymidine phosphorothioate
  modified_base 28: mod_base = OTHER; note = 2'-O-methyl guanosine
  modified_base 29: mod_base = OTHER; note = 2'-O-methyl uridine
  modified_base 30: mod_base = OTHER; note = 2'-O-methyl adenosine
  modified_base 31: mod_base = OTHER; note = 2'-O-methyl guanosine
  modified_base 32: mod_base = OTHER; note = 2'-O-methyl cytidine
  modified_base 33: mod_base = OTHER; note = Deoxythymidine phosphorothioate
  modified_base 35: mod_base = OTHER; note = Deoxycytidine phosphorothioate
  modified_base 38: mod_base = OTHER; note = 2'-O-methyl uridine
  modified_base 39: mod_base = OTHER; note = 2'-O-methyl uridine
  modified_base 40: mod_base = OTHER; note = 2'-O-methyl cytidine
  modified_base 41: mod_base = OTHER; note = 2'-O-methyl uridine
  modified_base 42: mod_base = OTHER; note = 2'-O-methyl cytidine
  modified_base 43: mod_base = OTHER; note = 2'-O-methyl adenosine
  modified_base 44: mod_base = OTHER; note = 2'-O-methyl uridine
  modified_base 45: mod_base = OTHER; note = 2'-O-methyl uridine phosphorothioate
  modified_base 46: mod_base = OTHER; note = 2'-O-methyl uridine phosphorothioate
  modified_base 47: mod_base = OTHER; note = 2'-O-methyl cytidine phosphorothioate
  modified_base 48: mod_base = OTHER; note = 2'-O-methyl guanosine
  misc_feature 1..6: note = RNA
  misc_feature 7: note = DNA
  misc_feature 8..25: note = RNA
  misc_feature 26: note = DNA
  misc_feature 27..32: note = RNA
  misc_feature 33: note = DNA
  misc_feature 34: note = RNA
  misc_feature 35: note = DNA
  misc_feature 36..48: note = RNA

SEQ ID NO: 73 - DNA, 48 bp, synthetic construct; identical to SEQ ID NO: 14
  source 1..48: mol_type = other DNA
  misc_difference 1: note = Any 2'-O-methyl nucleotide with a 3' phosphorothioate attached
  misc_difference 2: note = Any 2'-O-methyl nucleotide with a 3' phosphorothioate attached
  misc_difference 3: note = Any 2'-O-methyl nucleotide with a 3' phosphorothioate attached
  misc_difference 4: note = Any 2'-O-methyl nucleotide
  misc_difference 5: note = Any 2'-O-methyl nucleotide
  misc_difference 6: note = Any 2'-O-methyl nucleotide
  misc_difference 7: note = Any nucleotide with a 3' phosphorothioate attached
  misc_difference 8: note = Any 2'-O-methyl nucleotide
  misc_difference 9: note = Any 2'-O-methyl nucleotide
  misc_difference 10: note = Any 2'-O-methyl nucleotide
  misc_difference 11: note = Any 2'-O-methyl nucleotide
  misc_difference 12: note = Any 2'-fluoro nucleotide
  misc_difference 13: note = Any 2'-O-methyl nucleotide
  misc_difference 14: note = Any 2'-fluoro nucleotide
  misc_difference 15: note = Any 2'-O-methyl nucleotide
  misc_difference 16: note = Any 2'-fluoro nucleotide
  misc_difference 17: note = Any 2'-O-methyl nucleotide
  misc_difference 18: note = Any 2'-O-methyl nucleotide
  misc_difference 19: note = Any 2'-O-methyl nucleotide
  misc_difference 20: note = Any 2'-O-methyl nucleotide
  misc_difference 21: note = Any 2'-fluoro nucleotide
  misc_difference 22: note = Any 2'-O-methyl nucleotide
  misc_difference 23: note = Any 2'-O-methyl nucleotide
  misc_difference 24: note = Any 2'-O-methyl nucleotide
  modified_base 25: mod_base = OTHER; note = 2'-O-methyl guanosine
  modified_base 26: mod_base = OTHER; note = Deoxythymidine phosphorothioate
  modified_base 28: mod_base = OTHER; note = 2'-O-methyl guanosine
  modified_base 29: mod_base = OTHER; note = 2'-O-methyl uridine
  modified_base 30: mod_base = OTHER; note = 2'-O-methyl adenosine
  modified_base 31: mod_base = OTHER; note = 2'-O-methyl guanosine
  modified_base 32: mod_base = OTHER; note = 2'-O-methyl cytidine
  modified_base 33: mod_base = OTHER; note = Deoxythymidine phosphorothioate
  modified_base 37: mod_base = OTHER; note = Deoxythymidine phosphorothioate
  modified_base 38: mod_base = OTHER; note = 2'-O-methyl uridine
  modified_base 39: mod_base = OTHER; note = 2'-O-methyl uridine
  modified_base 40: mod_base = OTHER; note = 2'-O-methyl cytidine
  modified_base 41: mod_base = OTHER; note = 2'-O-methyl uridine
  modified_base 42: mod_base = OTHER; note = 2'-O-methyl cytidine
  modified_base 43: mod_base = OTHER; note = 2'-O-methyl adenosine
  modified_base 44: mod_base = OTHER; note = 2'-O-methyl uridine
  modified_base 45: mod_base = OTHER; note = 2'-O-methyl uridine phosphorothioate
  modified_base 46: mod_base = OTHER; note = 2'-O-methyl uridine phosphorothioate
  modified_base 47: mod_base = OTHER; note = 2'-O-methyl cytidine phosphorothioate
  modified_base 48: mod_base = OTHER; note = 2'-O-methyl guanosine
  misc_feature 1..6: note = RNA
  misc_feature 7: note = DNA
  misc_feature 8..25: note = RNA
  misc_feature 26: note = DNA
  misc_feature 27..32: note = RNA
  misc_feature 33: note = DNA
  misc_feature 34..36: note = RNA
  misc_feature 37: note = DNA
  misc_feature 38..48: note = RNA

SEQ ID NO: 74 - DNA, 48 bp, synthetic construct; identical to SEQ ID NO: 14
  source 1..48: mol_type = other DNA
  misc_difference 1: note = Any 2'-O-methyl nucleotide with a 3' phosphorothioate attached
  misc_difference 2: note = Any 2'-O-methyl nucleotide with a 3' phosphorothioate attached
  misc_difference 3: note = Any 2'-O-methyl nucleotide with a 3' phosphorothioate attached
  misc_difference 4: note = Any 2'-O-methyl nucleotide
  misc_difference 5: note = Any 2'-O-methyl nucleotide
  misc_difference 6: note = Any 2'-O-methyl nucleotide
  misc_difference 7: note = Any nucleotide with a 3' phosphorothioate attached
  misc_difference 8: note = Any 2'-O-methyl nucleotide
  misc_difference 9: note = Any 2'-O-methyl nucleotide
  misc_difference 10: note = Any 2'-O-methyl nucleotide
  misc_difference 11: note = Any 2'-O-methyl nucleotide
  misc_difference 12: note = Any 2'-fluoro nucleotide
  misc_difference 13: note = Any 2'-O-methyl nucleotide
  misc_difference 14: note = Any 2'-fluoro nucleotide
  misc_difference 15: note = Any 2'-O-methyl nucleotide
  misc_difference 16: note = Any 2'-fluoro nucleotide
  misc_difference 17: note = Any 2'-O-methyl nucleotide
  misc_difference 18: note = Any 2'-O-methyl nucleotide
  misc_difference 19: note = Any 2'-O-methyl nucleotide
  misc_difference 20: note = Any 2'-O-methyl nucleotide
  misc_difference 21: note = Any 2'-fluoro nucleotide
  misc_difference 22: note = Any 2'-O-methyl nucleotide
  misc_difference 23: note = Any 2'-O-methyl nucleotide
  misc_difference 24: note = Any 2'-O-methyl nucleotide
  modified_base 25: mod_base = OTHER; note = 2'-O-methyl guanosine
  modified_base 26: mod_base = OTHER; note = Deoxythymidine phosphorothioate
  modified_base 28: mod_base = OTHER; note = 2'-O-methyl guanosine
  modified_base 29: mod_base = OTHER; note = 2'-O-methyl uridine
  modified_base 30: mod_base = OTHER; note = 2'-O-methyl adenosine
  modified_base 31: mod_base = OTHER; note = 2'-O-methyl guanosine
  modified_base 32: mod_base = OTHER; note = 2'-O-methyl cytidine
  modified_base 33: mod_base = OTHER; note = Deoxythymidine phosphorothioate
  modified_base 35: mod_base = OTHER; note = 2'-O-methyl cytidine
  modified_base 38: mod_base = OTHER; note = 2'-O-methyl uridine
  modified_base 39: mod_base = OTHER; note = 2'-O-methyl uridine
  modified_base 40: mod_base = OTHER; note = 2'-O-methyl cytidine
  modified_base 41: mod_base = OTHER; note = 2'-O-methyl uridine
  modified_base 42: mod_base = OTHER; note = 2'-O-methyl cytidine
  modified_base 43: mod_base = OTHER; note = 2'-O-methyl adenosine
  modified_base 44: mod_base = OTHER; note = 2'-O-methyl uridine
  modified_base 45: mod_base = OTHER; note = 2'-O-methyl uridine phosphorothioate
  modified_base 46: mod_base = OTHER; note = 2'-O-methyl uridine phosphorothioate
  modified_base 47: mod_base = OTHER; note = 2'-O-methyl cytidine phosphorothioate
  modified_base 48: mod_base = OTHER; note = 2'-O-methyl guanosine
  misc_feature 1..6: note = RNA
  misc_feature 7: note = DNA
  misc_feature 8..25: note = RNA
  misc_feature 26: note = DNA
  misc_feature 27..32: note = RNA
  misc_feature 33: note = DNA
  misc_feature 34..48: note = RNA

SEQ ID NO: 75 - DNA, 48 bp, synthetic construct; identical to SEQ ID NO: 14
  source 1..48: mol_type = other DNA
  misc_difference 1: note = Any 2'-O-methyl nucleotide with a 3' phosphorothioate attached
  misc_difference 2: note = Any 2'-O-methyl nucleotide with a 3' phosphorothioate attached
  misc_difference 3: note = Any 2'-O-methyl nucleotide with a 3' phosphorothioate attached
  misc_difference 4: note = Any 2'-O-methyl nucleotide
  misc_difference 5: note = Any 2'-O-methyl nucleotide
  misc_difference 6: note = Any 2'-O-methyl nucleotide
  misc_difference 7: note = Any nucleotide with a 3' phosphorothioate attached
  misc_difference 8: note = Any 2'-O-methyl nucleotide
  misc_difference 9: note = Any 2'-O-methyl nucleotide
  misc_difference 10: note = Any 2'-O-methyl nucleotide
  misc_difference 11: note = Any 2'-O-methyl nucleotide
  misc_difference 12: note = Any 2'-fluoro nucleotide
  misc_difference 13: note = Any 2'-O-methyl nucleotide
  misc_difference 14: note = Any 2'-fluoro nucleotide
  misc_difference 15: note = Any 2'-O-methyl nucleotide
  misc_difference 16: note = Any 2'-fluoro nucleotide
  misc_difference 17: note = Any 2'-O-methyl nucleotide
  misc_difference 18: note = Any 2'-O-methyl nucleotide
  misc_difference 19: note = Any 2'-O-methyl nucleotide
  misc_difference 20: note = Any 2'-O-methyl nucleotide
  misc_difference 21: note = Any 2'-fluoro nucleotide
  misc_difference 22: note = Any 2'-O-methyl nucleotide
  misc_difference 23: note = Any 2'-O-methyl nucleotide
  misc_difference 24: note = Any 2'-O-methyl nucleotide
  modified_base 25: mod_base = OTHER; note = 2'-O-methyl guanosine
  modified_base 26: mod_base = OTHER; note = Deoxythymidine phosphorothioate
  modified_base 28: mod_base = OTHER; note = 2'-O-methyl guanosine
  modified_base 29: mod_base = OTHER; note = 2'-O-methyl uridine
  modified_base 30: mod_base = OTHER; note = 2'-O-methyl adenosine
  modified_base 31: mod_base = OTHER; note = 2'-O-methyl guanosine
  modified_base 32: mod_base = OTHER; note = 2'-O-methyl cytidine
  modified_base 33: mod_base = OTHER; note = Deoxythymidine phosphorothioate
  modified_base 35: mod_base = OTHER; note = Deoxycytidine phosphorothioate
  modified_base 36: mod_base = OTHER; note = Deoxycytidine phosphorothioate
  modified_base 38: mod_base = OTHER; note = 2'-O-methyl uridine
  modified_base 39: mod_base = OTHER; note = 2'-O-methyl uridine
  modified_base 40: mod_base = OTHER; note = 2'-O-methyl cytidine
  modified_base 41: mod_base = OTHER; note = 2'-O-methyl uridine
  modified_base 42: mod_base = OTHER; note = 2'-O-methyl cytidine
  modified_base 43: mod_base = OTHER; note = 2'-O-methyl adenosine
  modified_base 44: mod_base = OTHER; note = 2'-O-methyl uridine
  modified_base 45: mod_base = OTHER; note = 2'-O-methyl uridine phosphorothioate
  modified_base 46: mod_base = OTHER; note = 2'-O-methyl uridine phosphorothioate
  modified_base 47: mod_base = OTHER; note = 2'-O-methyl cytidine phosphorothioate
  modified_base 48: mod_base = OTHER; note = 2'-O-methyl guanosine
  misc_feature 1..6: note = RNA
  misc_feature 7: note = DNA
  misc_feature 8..25: note = RNA
  misc_feature 26: note = DNA
  misc_feature 27..32: note = RNA
  misc_feature 33: note = DNA
  misc_feature 34: note = RNA
  misc_feature 35..36: note = DNA
  misc_feature 37..48: note = RNA

SEQ ID NO: 76 - DNA, 48 bp, synthetic construct; identical to SEQ ID NO: 14
  source 1..48: mol_type = other DNA
  misc_difference 1: note = Any 2'-O-methyl nucleotide with a 3' phosphorothioate attached
  misc_difference 2: note = Any 2'-O-methyl nucleotide with a 3' phosphorothioate attached
  misc_difference 3: note = Any 2'-O-methyl nucleotide with a 3' phosphorothioate attached
  misc_difference 4: note = Any 2'-O-methyl nucleotide
  misc_difference 5: note = Any 2'-O-methyl nucleotide
  misc_difference 6: note = Any 2'-O-methyl nucleotide
  misc_difference 7: note = Any nucleotide with a 3' phosphorothioate attached
  misc_difference 8: note = Any 2'-O-methyl nucleotide
  misc_difference 9: note = Any 2'-O-methyl nucleotide
  misc_difference 10: note = Any 2'-O-methyl nucleotide
  misc_difference 11: note = Any 2'-O-methyl nucleotide
  misc_difference 12: note = Any 2'-fluoro nucleotide
  misc_difference 13: note = Any 2'-O-methyl nucleotide
  misc_difference 14: note = Any 2'-fluoro nucleotide
  misc_difference 15: note = Any 2'-O-methyl nucleotide
  misc_difference 16: note = Any 2'-fluoro nucleotide
  misc_difference 17: note = Any 2'-O-methyl nucleotide
  misc_difference 18: note = Any 2'-O-methyl nucleotide
  misc_difference 19: note = Any 2'-O-methyl nucleotide
  misc_difference 20: note = Any 2'-O-methyl nucleotide
  misc_difference 21: note = Any 2'-fluoro nucleotide
  misc_difference 22: note = Any 2'-O-methyl nucleotide
  misc_difference 23: note = Any 2'-O-methyl nucleotide
  misc_difference 24: note = Any 2'-O-methyl nucleotide
  modified_base 25: mod_base = OTHER; note = 2'-O-methyl guanosine
  modified_base 26: mod_base = OTHER; note = Deoxythymidine phosphorothioate
  modified_base 28: mod_base = OTHER; note = 2'-O-methyl guanosine
  modified_base 29: mod_base = OTHER; note = 2'-O-methyl uridine
  modified_base 30: mod_base = OTHER; note = 2'-O-methyl adenosine
  modified_base 31: mod_base = OTHER; note = 2'-O-methyl guanosine
  modified_base 32: mod_base = OTHER; note = 2'-O-methyl cytidine
  modified_base 33: mod_base = OTHER; note = Deoxythymidine phosphorothioate
  modified_base 35: mod_base = OTHER; note = Deoxycytidine phosphorothioate
  modified_base 37: mod_base = OTHER; note = Deoxythymidine phosphorothioate
  modified_base 38: mod_base = OTHER; note = 2'-O-methyl uridine
  modified_base 39: mod_base = OTHER; note = 2'-O-methyl uridine
  modified_base 40: mod_base = OTHER; note = 2'-O-methyl cytidine
  modified_base 41: mod_base = OTHER; note = 2'-O-methyl uridine
  modified_base 42: mod_base = OTHER; note = 2'-O-methyl cytidine
  modified_base 43: mod_base = OTHER; note = 2'-O-methyl adenosine
  modified_base 44: mod_base = OTHER; note = 2'-O-methyl uridine
  modified_base 45: mod_base = OTHER; note = 2'-O-methyl uridine phosphorothioate
  modified_base 46: mod_base = OTHER; note = 2'-O-methyl uridine phosphorothioate
  modified_base 47: mod_base = OTHER; note = 2'-O-methyl cytidine phosphorothioate
  modified_base 48: mod_base = OTHER; note = 2'-O-methyl guanosine
  misc_feature 1..6: note = RNA
  misc_feature 7: note = DNA
  misc_feature 8..25: note = RNA
  misc_feature 26: note = DNA
  misc_feature 27..32: note = RNA
  misc_feature 33: note = DNA
  misc_feature 34: note = RNA
  misc_feature 35: note = DNA
  misc_feature 36: note = RNA
  misc_feature 37: note = DNA
  misc_feature 38..48: note = RNA

SEQ ID NO: 77 - DNA, 48 bp, synthetic construct; identical to SEQ ID NO: 14
  source 1..48: mol_type = other DNA
  misc_difference 1: note = Any 2'-O-methyl nucleotide with a 3' phosphorothioate attached
  misc_difference 2: note = Any 2'-O-methyl nucleotide with a 3' phosphorothioate attached
  misc_difference 3: note = Any 2'-O-methyl nucleotide with a 3' phosphorothioate attached
  misc_difference 4: note = Any 2'-O-methyl nucleotide
  misc_difference 5: note = Any 2'-O-methyl nucleotide
  misc_difference 6: note = Any 2'-O-methyl nucleotide
  misc_difference 7: note = Any nucleotide with a 3' phosphorothioate attached
  misc_difference 8: note = Any 2'-O-methyl nucleotide
  misc_difference 9: note = Any 2'-O-methyl nucleotide
  misc_difference 10: note = Any 2'-O-methyl nucleotide
  misc_difference 11: note = Any 2'-O-methyl nucleotide
  misc_difference 12: note = Any 2'-fluoro nucleotide
  misc_difference 13: note = Any 2'-O-methyl nucleotide
  misc_difference 14: note = Any 2'-fluoro nucleotide
  misc_difference 15: note = Any 2'-O-methyl nucleotide
  misc_difference 16: note = Any 2'-fluoro nucleotide
  misc_difference 17: note = Any 2'-O-methyl nucleotide
  misc_difference 18: note = Any 2'-O-methyl nucleotide
  misc_difference 19: note = Any 2'-O-methyl nucleotide
  misc_difference 20: note = Any 2'-O-methyl nucleotide
  misc_difference 21: note = Any 2'-fluoro nucleotide
  misc_difference 22: note = Any 2'-O-methyl nucleotide
  misc_difference 23: note = Any 2'-O-methyl nucleotide
  misc_difference 24: note = Any 2'-O-methyl nucleotide
  modified_base 25: mod_base = OTHER; note = 2'-O-methyl guanosine
  modified_base 26: mod_base = OTHER; note = Deoxythymidine phosphorothioate
  modified_base 28: mod_base = OTHER; note = 2'-O-methyl guanosine
  modified_base 29: mod_base = OTHER; note = 2'-O-methyl uridine
  modified_base 30: mod_base = OTHER; note = 2'-O-methyl adenosine
  modified_base 31: mod_base = OTHER; note = 2'-O-methyl guanosine
  modified_base 32: mod_base = OTHER; note = 2'-O-methyl cytidine
  modified_base 33: mod_base = OTHER; note = Deoxythymidine phosphorothioate
  modified_base 35: mod_base = OTHER; note = Deoxycytidine phosphorothioate
  modified_base 36: mod_base = OTHER; note = Deoxycytidine phosphorothioate
  modified_base 37: mod_base = OTHER; note = Deoxythymidine phosphorothioate
  modified_base 38: mod_base = OTHER; note = 2'-O-methyl uridine
  modified_base 39: mod_base = OTHER; note = 2'-O-methyl uridine
  modified_base 40: mod_base = OTHER; note = 2'-O-methyl cytidine
  modified_base 41: mod_base = OTHER; note = 2'-O-methyl uridine
  modified_base 42: mod_base = OTHER; note = 2'-O-methyl cytidine
  modified_base 43: mod_base = OTHER; note = 2'-O-methyl adenosine
  modified_base 44: mod_base = OTHER; note = 2'-O-methyl uridine
  modified_base 45: mod_base = OTHER; note = 2'-O-methyl uridine phosphorothioate
  modified_base 46: mod_base = OTHER; note = 2'-O-methyl uridine phosphorothioate
  modified_base 47: mod_base = OTHER; note = 2'-O-methyl cytidine phosphorothioate
  modified_base 48: mod_base = OTHER; note = 2'-O-methyl guanosine
  misc_feature 1..6: note = RNA
  misc_feature 7: note = DNA
  misc_feature 8..25: note = RNA
  misc_feature 26: note = DNA
  misc_feature 27..32: note = RNA
  misc_feature 33: note = DNA
  misc_feature 34: note = RNA
  misc_feature 35..37: note = DNA
  misc_feature 38..48: note = RNA

SEQ ID NO: 78 - DNA, 48 bp, synthetic construct; identical to SEQ ID NO: 14
  source 1..48: mol_type = other DNA
  misc_difference 1: note = Any 2'-O-methyl nucleotide with a 3' phosphorothioate attached
  misc_difference 2: note = Any 2'-O-methyl nucleotide with a 3' phosphorothioate attached
  misc_difference 3: note = Any 2'-O-methyl nucleotide with a 3' phosphorothioate attached
  misc_difference 4: note = Any 2'-O-methyl nucleotide
  misc_difference 5: note = Any 2'-O-methyl nucleotide
  misc_difference 6: note = Any 2'-O-methyl nucleotide
  misc_difference 7: note = Any nucleotide with a 3' phosphorothioate attached
  misc_difference 8: note = Any 2'-O-methyl nucleotide
  misc_difference 9: note = Any 2'-O-methyl nucleotide
  misc_difference 10: note = Any 2'-O-methyl nucleotide
  misc_difference 11: note = Any 2'-O-methyl nucleotide
  misc_difference 12: note = Any 2'-fluoro nucleotide
  misc_difference 13: note = Any 2'-O-methyl nucleotide
  misc_difference 14: note = Any 2'-fluoro nucleotide
  misc_difference 15: note = Any 2'-O-methyl nucleotide
  misc_difference 16: note = Any 2'-fluoro nucleotide
  misc_difference 17: note = Any 2'-O-methyl nucleotide
  misc_difference 18: note = Any 2'-O-methyl nucleotide
  misc_difference 19: note = Any 2'-O-methyl nucleotide
  misc_difference 20: note = Any 2'-O-methyl nucleotide
  misc_difference 21: note = Any 2'-fluoro nucleotide
  misc_difference 22: note = Any 2'-O-methyl nucleotide
  misc_difference 23: note = Any 2'-O-methyl nucleotide
  misc_difference 24: note = Any 2'-O-methyl nucleotide
  modified_base 25: mod_base = OTHER; note = 2'-O-methyl guanosine
  modified_base 26: mod_base = OTHER; note = Deoxythymidine phosphorothioate
  modified_base 28: mod_base = OTHER; note = 2'-O-methyl guanosine
  modified_base 29: mod_base = OTHER; note = 2'-O-methyl uridine
  modified_base 30: mod_base = OTHER; note = 2'-O-methyl adenosine
  modified_base 31: mod_base = OTHER; note = 2'-O-methyl guanosine
  modified_base 32: mod_base = OTHER; note = 2'-O-methyl cytidine
  modified_base 33: mod_base = OTHER; note = Deoxythymidine phosphorothioate
  modified_base 35: mod_base = OTHER; note = 2'-O-methyl cytidine
  modified_base 36: mod_base = OTHER; note = Deoxycytidine phosphorothioate
  modified_base 38: mod_base = OTHER; note = 2'-O-methyl uridine
  modified_base 39: mod_base = OTHER; note = 2'-O-methyl uridine
  modified_base 40: mod_base = OTHER; note = 2'-O-methyl cytidine
  modified_base 41: mod_base = OTHER; note = 2'-O-methyl uridine
  modified_base 42: mod_base = OTHER; note = 2'-O-methyl cytidine
  modified_base 43: mod_base = OTHER; note = 2'-O-methyl adenosine
  modified_base 44: mod_base = OTHER; note = 2'-O-methyl uridine
  modified_base 45: mod_base = OTHER; note = 2'-O-methyl uridine phosphorothioate
  modified_base 46: mod_base = OTHER; note = 2'-O-methyl uridine phosphorothioate
  modified_base 47: mod_base = OTHER; note = 2'-O-methyl cytidine phosphorothioate
  modified_base 48: mod_base = OTHER; note = 2'-O-methyl guanosine
  misc_feature 1..6: note = RNA
  misc_feature 7: note = DNA
  misc_feature 8..25: note = RNA
  misc_feature 26: note = DNA
  misc_feature 27..32: note = RNA
  misc_feature 33: note = DNA
  misc_feature 34..35: note = RNA
  misc_feature 36: note = DNA
  misc_feature 37..48: note = RNA

SEQ ID NO: 79 - DNA, 48 bp, synthetic construct; identical to SEQ ID NO: 14
  source 1..48: mol_type = other DNA
  misc_difference 1: note = Any 2'-O-methyl nucleotide with a 3' phosphorothioate attached
  misc_difference 2: note = Any 2'-O-methyl nucleotide with a 3' phosphorothioate attached
  misc_difference 3: note = Any 2'-O-methyl nucleotide with a 3' phosphorothioate attached
  misc_difference 4: note = Any 2'-O-methyl nucleotide
  misc_difference 5: note = Any 2'-O-methyl nucleotide
  misc_difference 6: note = Any 2'-O-methyl nucleotide
  misc_difference 7: note = Any nucleotide with a 3' phosphorothioate attached
  misc_difference 8: note = Any 2'-O-methyl nucleotide
  misc_difference 9: note = Any 2'-O-methyl nucleotide
  misc_difference 10: note = Any 2'-O-methyl nucleotide
  misc_difference 11: note = Any 2'-O-methyl nucleotide
  misc_difference 12: note = Any 2'-fluoro nucleotide
  misc_difference 13: note = Any 2'-O-methyl nucleotide
  misc_difference 14: note = Any 2'-fluoro nucleotide
  misc_difference 15: note = Any 2'-O-methyl nucleotide
  misc_difference 16: note = Any 2'-fluoro nucleotide
  misc_difference 17: note = Any 2'-O-methyl nucleotide
  misc_difference 18: note = Any 2'-O-methyl nucleotide
  misc_difference 19: note = Any 2'-O-methyl nucleotide
  misc_difference 20: note = Any 2'-O-methyl nucleotide
  misc_difference 21: note = Any 2'-fluoro nucleotide
  misc_difference 22: note = Any 2'-O-methyl nucleotide
  misc_difference 23: note = Any 2'-O-methyl nucleotide
  misc_difference 24: note = Any 2'-O-methyl nucleotide
  modified_base 25: mod_base = OTHER; note = 2'-O-methyl guanosine
  modified_base 26: mod_base = OTHER; note = Deoxythymidine phosphorothioate
  modified_base 28: mod_base = OTHER; note = 2'-O-methyl guanosine
  modified_base 29: mod_base = OTHER; note = 2'-O-methyl uridine
  modified_base 30: mod_base = OTHER; note = 2'-O-methyl adenosine
  modified_base 31: mod_base = OTHER; note = 2'-O-methyl guanosine
  modified_base 32: mod_base = OTHER; note = 2'-O-methyl cytidine
  modified_base 33: mod_base = OTHER; note = Deoxythymidine phosphorothioate
  modified_base 35: mod_base = OTHER; note = 2'-O-methyl cytidine
  modified_base 37: mod_base = OTHER; note = Deoxythymidine phosphorothioate
  modified_base 38: mod_base = OTHER; note = 2'-O-methyl uridine
  modified_base 39: mod_base = OTHER; note = 2'-O-methyl uridine
  modified_base 40: mod_base = OTHER; note = 2'-O-methyl cytidine
  modified_base 41: mod_base = OTHER; note = 2'-O-methyl uridine
  modified_base 42: mod_base = OTHER; note = 2'-O-methyl cytidine
  modified_base 43: mod_base = OTHER; note = 2'-O-methyl adenosine
  modified_base 44: mod_base = OTHER; note = 2'-O-methyl uridine
  modified_base 45: mod_base = OTHER; note = 2'-O-methyl uridine phosphorothioate
  modified_base 46: mod_base = OTHER; note = 2'-O-methyl uridine phosphorothioate
  modified_base 47: mod_base = OTHER; note = 2'-O-methyl cytidine phosphorothioate
  modified_base 48: mod_base = OTHER; note = 2'-O-methyl guanosine
  misc_feature 1..6: note = RNA
  misc_feature 7: note = DNA
  misc_feature 8..25: note = RNA
  misc_feature 26: note = DNA
  misc_feature 27..32: note = RNA
  misc_feature 33: note = DNA
  misc_feature 34..36: note = RNA
  misc_feature 37: note = DNA
  misc_feature 38..48: note = RNA

SEQ ID NO: 80 - DNA, 48 bp, synthetic construct; identical to SEQ ID NO: 14
  source 1..48: mol_type = other DNA
  misc_difference 1: note = Any 2'-O-methyl nucleotide with a 3' phosphorothioate attached
  misc_difference 2: note = Any 2'-O-methyl nucleotide with a 3' phosphorothioate attached
  misc_difference 3: note = Any 2'-O-methyl nucleotide with a 3' phosphorothioate attached
  misc_difference 4: note = Any 2'-O-methyl nucleotide
  misc_difference 5: note = Any 2'-O-methyl nucleotide
  misc_difference 6: note = Any 2'-O-methyl nucleotide
  misc_difference 7: note = Any nucleotide with a 3' phosphorothioate attached
  misc_difference 8: note = Any 2'-O-methyl nucleotide
  misc_difference 9: note = Any 2'-O-methyl nucleotide
  misc_difference 10: note = Any 2'-O-methyl nucleotide
  misc_difference 11: note = Any 2'-O-methyl nucleotide
  misc_difference 12: note = Any 2'-fluoro nucleotide
  misc_difference 13: note = Any 2'-O-methyl nucleotide
  misc_difference 14: note = Any 2'-fluoro nucleotide
  misc_difference 15: note = Any 2'-O-methyl nucleotide
  misc_difference 16: note = Any 2'-fluoro nucleotide
  misc_difference 17: note = Any 2'-O-methyl nucleotide
  misc_difference 18: note = Any 2'-O-methyl nucleotide
  misc_difference 19: note = Any 2'-O-methyl nucleotide
  misc_difference 20: note = Any 2'-O-methyl nucleotide
  misc_difference 21: note = Any 2'-fluoro nucleotide
  misc_difference 22: note = Any 2'-O-methyl nucleotide
  misc_difference 23: note = Any 2'-O-methyl nucleotide
  misc_difference 24: note = Any 2'-O-methyl nucleotide
  modified_base 25: mod_base = OTHER; note = 2'-O-methyl guanosine
  modified_base 26: mod_base = OTHER; note = Deoxythymidine phosphorothioate
  modified_base 28: mod_base = OTHER; note = 2'-O-methyl guanosine
  modified_base 29: mod_base = OTHER; note = 2'-O-methyl uridine
  modified_base 30: mod_base = OTHER; note = 2'-O-methyl adenosine
  modified_base 31: mod_base = OTHER; note = 2'-O-methyl guanosine
  modified_base 32: mod_base = OTHER; note = 2'-O-methyl cytidine
  modified_base 33: mod_base = OTHER; note = Deoxythymidine phosphorothioate
  modified_base 35: mod_base = OTHER; note = 2'-O-methyl cytidine
  modified_base 36: mod_base = OTHER; note = Deoxycytidine phosphorothioate
  modified_base 37: mod_base = OTHER; note = Deoxythymidine phosphorothioate
  modified_base 38: mod_base = OTHER; note = 2'-O-methyl uridine
  modified_base 39: mod_base = OTHER; note = 2'-O-methyl uridine
  modified_base 40: mod_base = OTHER; note = 2'-O-methyl cytidine
  modified_base 41: mod_base = OTHER; note = 2'-O-methyl uridine
  modified_base 42: mod_base = OTHER; note = 2'-O-methyl cytidine
  modified_base 43: mod_base = OTHER; note = 2'-O-methyl adenosine
  modified_base 44: mod_base = OTHER; note = 2'-O-methyl uridine
  modified_base 45: mod_base = OTHER; note = 2'-O-methyl uridine phosphorothioate
  modified_base 46: mod_base = OTHER; note = 2'-O-methyl uridine phosphorothioate
  modified_base 47: mod_base = OTHER; note = 2'-O-methyl cytidine phosphorothioate
  modified_base 48: mod_base = OTHER; note = 2'-O-methyl guanosine
  misc_feature 1..6: note = RNA
  misc_feature 7: note = DNA
  misc_feature 8..25: note = RNA
  misc_feature 26: note = DNA
  misc_feature 27..32: note = RNA
  misc_feature 33: note = DNA
  misc_feature 34..35: note = RNA
  misc_feature 36..37: note = DNA
  misc_feature 38..48: note = RNA

SEQ ID NO: 81 - DNA, 48 bp, synthetic construct; identical to SEQ ID NO: 14
  source 1..48: mol_type = other DNA
  misc_difference 1: note = Any 2'-O-methyl nucleotide with a 3' phosphorothioate attached
  misc_difference 2: note = Any 2'-O-methyl nucleotide with a 3' phosphorothioate attached
  misc_difference 3: note = Any 2'-O-methyl nucleotide with a 3' phosphorothioate attached
  misc_difference 4: note = Any 2'-O-methyl nucleotide
  misc_difference 5: note = Any 2'-O-methyl nucleotide
  misc_difference 6: note = Any 2'-O-methyl nucleotide
  misc_difference 7: note = Any nucleotide with a 3' phosphorothioate attached
  misc_difference 8: note = Any 2'-O-methyl nucleotide
  misc_difference 9: note = Any 2'-O-methyl nucleotide
  misc_difference 10: note = Any 2'-O-methyl nucleotide
  misc_difference 11: note = Any 2'-O-methyl nucleotide
  misc_difference 12: note = Any 2'-fluoro nucleotide
  misc_difference 13: note = Any 2'-O-methyl nucleotide
  misc_difference 14: note = Any 2'-fluoro nucleotide
  misc_difference 15: note = Any 2'-O-methyl nucleotide
  misc_difference 16: note = Any 2'-fluoro nucleotide
  misc_difference 17: note = Any 2'-O-methyl nucleotide
  misc_difference 18: note = Any 2'-O-methyl nucleotide
  misc_difference 19: note = Any 2'-O-methyl nucleotide
  misc_difference 20: note = Any 2'-O-methyl nucleotide
  misc_difference 21: note = Any 2'-fluoro nucleotide
  misc_difference 22: note = Any 2'-O-methyl nucleotide
  misc_difference 23: note = Any 2'-O-methyl nucleotide
  misc_difference 24: note = Any 2'-O-methyl nucleotide
  modified_base 25: mod_base = OTHER; note = 2'-O-methyl guanosine
  modified_base 26: mod_base = OTHER; note = Deoxythymidine phosphorothioate
  modified_base 28: mod_base = OTHER; note = 2'-O-methyl guanosine
  modified_base 29: mod_base = OTHER; note = 2'-O-methyl uridine
  modified_base 30: mod_base = OTHER; note = 2'-O-methyl adenosine
  modified_base 31: mod_base = OTHER; note = 2'-O-methyl guanosine
  modified_base 32: mod_base = OTHER; note = 2'-O-methyl cytidine
  modified_base 33: mod_base = OTHER; note = Deoxythymidine phosphorothioate
  modified_base 35: mod_base = OTHER; note = 2'-O-methyl cytidine
  modified_base 36: mod_base = OTHER; note = 2'-O-methyl cytidine
  modified_base 38: mod_base = OTHER; note = 2'-O-methyl uridine
  modified_base 39: mod_base = OTHER; note = 2'-O-methyl uridine
  modified_base 40: mod_base = OTHER; note = 2'-O-methyl cytidine
  modified_base 41: mod_base = OTHER; note = 2'-O-methyl uridine
  modified_base 42: mod_base = OTHER; note = 2'-O-methyl cytidine
  modified_base 43: mod_base = OTHER; note = 2'-O-methyl adenosine
  modified_base 44: mod_base = OTHER; note = 2'-O-methyl uridine
  modified_base 45: mod_base = OTHER; note = 2'-O-methyl uridine phosphorothioate
  modified_base 46: mod_base = OTHER; note = 2'-O-methyl uridine phosphorothioate
  modified_base 47: mod_base = OTHER; note = 2'-O-methyl cytidine phosphorothioate
  modified_base 48: mod_base = OTHER; note = 2'-O-methyl guanosine
  misc_feature 1..6: note = RNA
  misc_feature 7: note = DNA
  misc_feature 8..25: note = RNA
  misc_feature 26: note = DNA
  misc_feature 27..32: note = RNA
  misc_feature 33: note = DNA
  misc_feature 34..48: note = RNA

SEQ ID NO: 82 - DNA, 48 bp, synthetic construct; identical to SEQ ID NO: 14
  source 1..48: mol_type = other DNA
  misc_difference 1: note = Any 2'-O-methyl nucleotide with a 3' phosphorothioate attached
  misc_difference 2: note = Any 2'-O-methyl nucleotide with a 3' phosphorothioate attached
  misc_difference 3: note = Any 2'-O-methyl nucleotide with a 3' phosphorothioate attached
  misc_difference 4: note = Any 2'-O-methyl nucleotide
  misc_difference 5: note = Any 2'-O-methyl nucleotide
  misc_difference 6: note = Any 2'-O-methyl nucleotide
  misc_difference 7: note = Any nucleotide with a 3' phosphorothioate attached
  misc_difference 8: note = Any 2'-O-methyl nucleotide
  misc_difference 9: note = Any 2'-O-methyl nucleotide
  misc_difference 10: note = Any 2'-O-methyl nucleotide
  misc_difference 11: note = Any 2'-O-methyl nucleotide
  misc_difference 12: note = Any 2'-fluoro nucleotide
  misc_difference 13: note = Any 2'-O-methyl nucleotide
  misc_difference 14: note = Any 2'-fluoro nucleotide
  misc_difference 15: note = Any 2'-O-methyl nucleotide
  misc_difference 16: note = Any 2'-fluoro nucleotide
  misc_difference 17: note = Any 2'-O-methyl nucleotide
  misc_difference 18: note = Any 2'-O-methyl nucleotide
  misc_difference 19: note = Any 2'-O-methyl nucleotide
  misc_difference 20: note = Any 2'-O-methyl nucleotide
  misc_difference 21: note = Any 2'-fluoro nucleotide
  misc_difference 22: note = Any 2'-O-methyl nucleotide
  misc_difference 23: note = Any 2'-O-methyl nucleotide
  misc_difference 24: note = Any 2'-O-methyl nucleotide
  modified_base 25: mod_base = OTHER; note = 2'-O-methyl guanosine
  modified_base 26: mod_base = OTHER; note = Deoxythymidine phosphorothioate
  modified_base 28: mod_base = OTHER; note = 2'-O-methyl guanosine
  modified_base 29: mod_base = OTHER; note = 2'-O-methyl uridine
  modified_base 30: mod_base = OTHER; note = 2'-O-methyl adenosine
  modified_base 31: mod_base = OTHER; note = 2'-O-methyl guanosine
  modified_base 32: mod_base = OTHER; note = 2'-O-methyl cytidine
  modified_base 33: mod_base = OTHER; note = Deoxythymidine phosphorothioate
  modified_base 35: mod_base = OTHER; note = 2'-O-methyl cytidine
  modified_base 36: mod_base = OTHER; note = 2'-O-methyl cytidine
  modified_base 37: mod_base = OTHER; note = Deoxythymidine phosphorothioate
  modified_base 38: mod_base = OTHER; note = 2'-O-methyl uridine
  modified_base 39: mod_base = OTHER; note = 2'-O-methyl uridine
  modified_base 40: mod_base = OTHER; note = 2'-O-methyl cytidine
  modified_base 41: mod_base = OTHER; note = 2'-O-methyl uridine
  modified_base 42: mod_base = OTHER; note = 2'-O-methyl cytidine
  modified_base 43: mod_base = OTHER; note = 2'-O-methyl adenosine
  modified_base 44: mod_base = OTHER; note = 2'-O-methyl uridine
  modified_base 45: mod_base = OTHER; note = 2'-O-methyl uridine phosphorothioate
  modified_base 46: mod_base = OTHER; note = 2'-O-methyl uridine phosphorothioate
  modified_base 47: mod_base = OTHER; note = 2'-O-methyl cytidine phosphorothioate
  modified_base 48: mod_base = OTHER; note = 2'-O-methyl guanosine
  misc_feature 1..6: note = RNA
  misc_feature 7: note = DNA
  misc_feature 8..25: note = RNA
  misc_feature 26: note = DNA
  misc_feature 27..32: note = RNA
  misc_feature 33: note = DNA
  misc_feature 34..36: note = RNA
  misc_feature 37: note = DNA
  misc_feature 38..48: note = RNA

SEQ ID NO: 83 - DNA, 48 bp, synthetic construct; identical to SEQ ID NO: 14
  source 1..48: mol_type = other DNA
  misc_difference 1: note = Any 2'-O-methyl nucleotide with a 3' phosphorothioate attached
  misc_difference 2: note = Any 2'-O-methyl nucleotide with a 3' phosphorothioate attached
  misc_difference 3: note = Any 2'-O-methyl nucleotide with a 3' phosphorothioate attached
  misc_difference 4: note = Any 2'-O-methyl nucleotide
  misc_difference 5: note = Any 2'-O-methyl nucleotide
  misc_difference 6: note = Any 2'-O-methyl nucleotide
  misc_difference 7: note = Any nucleotide with a 3' phosphorothioate attached
  misc_difference 8: note = Any 2'-O-methyl nucleotide
  misc_difference 9: note = Any 2'-O-methyl nucleotide
  misc_difference 10: note = Any 2'-O-methyl nucleotide
  misc_difference 11: note = Any 2'-O-methyl nucleotide
  misc_difference 12: note = Any 2'-fluoro nucleotide
  misc_difference 13: note = Any 2'-O-methyl nucleotide
  misc_difference 14: note = Any 2'-fluoro nucleotide
  misc_difference 15: note = Any 2'-O-methyl nucleotide
  misc_difference 16: note = Any 2'-fluoro nucleotide
  misc_difference 17: note = Any 2'-O-methyl nucleotide
  misc_difference 18: note = Any 2'-O-methyl nucleotide
  misc_difference 19: note = Any 2'-fluoro nucleotide
  misc_difference 20: note = Any 2'-O-methyl nucleotide
  misc_difference 21: note = Any 2'-fluoro nucleotide
  misc_difference 22: note = Any 2'-O-methyl nucleotide
  misc_difference 23: note = Any 2'-O-methyl nucleotide
  misc_difference 24: note = Any 2'-O-methyl nucleotide
  modified_base 25: mod_base = OTHER; note = 2'-O-methyl guanosine
  modified_base 28: mod_base = OTHER; note = 2'-O-methyl guanosine
  modified_base 29: mod_base = OTHER; note = 2'-O-methyl uridine
  modified_base 30: mod_base = OTHER; note = 2'-O-methyl adenosine
  modified_base 31: mod_base = OTHER; note = 2'-O-methyl guanosine
  modified_base 32: mod_base = OTHER; note = 2'-O-methyl cytidine
  modified_base 35: mod_base = OTHER; note = Deoxycytidine phosphorothioate
  modified_base 36: mod_base = OTHER; note = Deoxycytidine phosphorothioate
  modified_base 37: mod_base = OTHER; note = Deoxythymidine phosphorothioate
  modified_base 38: mod_base = OTHER; note = 2'-O-methyl uridine
  modified_base 39: mod_base = OTHER; note = 2'-O-methyl uridine
  modified_base 40: mod_base = OTHER; note = 2'-O-methyl cytidine
  modified_base 41: mod_base = OTHER; note = 2'-O-methyl uridine
  modified_base 42: mod_base = OTHER; note = 2'-O-methyl cytidine
  modified_base 43: mod_base = OTHER; note = 2'-O-methyl adenosine
  modified_base 44: mod_base = OTHER; note = 2'-O-methyl uridine
  modified_base 45: mod_base = OTHER; note = 2'-O-methyl uridine phosphorothioate
  modified_base 46: mod_base = OTHER; note = 2'-O-methyl uridine phosphorothioate
  modified_base 47: mod_base = OTHER; note = 2'-O-methyl cytidine phosphorothioate
  modified_base 48: mod_base = OTHER; note = 2'-O-methyl guanosine
  misc_feature 1..6: note = RNA
  misc_feature 7: note = DNA
  misc_feature 8..34: note = RNA
  misc_feature 35..37: note = DNA
  misc_feature 38..48: note = RNA

SEQ ID NO: 84 - DNA, 48 bp, synthetic construct; identical to SEQ ID NO: 14
  source 1..48: mol_type = other DNA
  misc_difference 1: note = Any 2'-O-methyl nucleotide with a 3' phosphorothioate attached
  misc_difference 2: note = Any 2'-O-methyl nucleotide with a 3' phosphorothioate attached
  misc_difference 3: note = Any 2'-O-methyl nucleotide with a 3' phosphorothioate attached
  misc_difference 4: note = Any 2'-O-methyl nucleotide
  misc_difference 5: note = Any 2'-O-methyl nucleotide
  misc_difference 6: note = Any 2'-O-methyl nucleotide
  misc_difference 7: note = Any nucleotide with a 3' phosphorothioate attached
  misc_difference 8: note = Any 2'-O-methyl nucleotide
  misc_difference 9: note = Any 2'-O-methyl nucleotide
  misc_difference 10: note = Any 2'-O-methyl nucleotide
  misc_difference 11: note = Any 2'-O-methyl nucleotide
  misc_difference 12: note = Any 2'-fluoro nucleotide
  misc_difference 13: note = Any 2'-O-methyl nucleotide
  misc_difference 14: note = Any 2'-fluoro nucleotide
  misc_difference 15: note = Any 2'-O-methyl nucleotide
  misc_difference 16: note = Any 2'-fluoro nucleotide
  misc_difference 17: note = Any 2'-O-methyl nucleotide
  misc_difference 18: note = Any 2'-O-methyl nucleotide
  misc_difference 19: note = Any 2'-fluoro nucleotide
  misc_difference 20: note = Any 2'-O-methyl nucleotide
  misc_difference 21: note = Any 2'-fluoro nucleotide
  misc_difference 22: note = Any 2'-O-methyl nucleotide
  misc_difference 23: note = Any 2'-O-methyl nucleotide
  misc_difference 24: note = Any 2'-O-methyl nucleotide
  modified_base 25: mod_base = OTHER; note = 2'-O-methyl guanosine
  modified_base 28: mod_base = OTHER; note = 2'-O-methyl guanosine
  modified_base 29: mod_base = OTHER; note = 2'-O-methyl uridine
  modified_base 30: mod_base = OTHER; note = 2'-O-methyl adenosine
  modified_base 31: mod_base = OTHER; note = 2'-O-methyl guanosine
  modified_base 32: mod_base = OTHER; note = 2'-O-methyl cytidine
  modified_base 35: mod_base = OTHER; note = 2'-O-methyl cytidine
  modified_base 36: mod_base = OTHER; note = Deoxycytidine phosphorothioate
  modified_base 37: mod_base = OTHER; note = Deoxythymidine phosphorothioate
  modified_base 38: mod_base = OTHER; note = 2'-O-methyl uridine
  modified_base 39: mod_base = OTHER; note = 2'-O-methyl uridine
  modified_base 40: mod_base = OTHER; note = 2'-O-methyl cytidine
  modified_base 41: mod_base = OTHER; note = 2'-O-methyl uridine
  modified_base 42: mod_base = OTHER; note = 2'-O-methyl cytidine
  modified_base 43: mod_base = OTHER; note = 2'-O-methyl adenosine
  modified_base 44: mod_base = OTHER; note = 2'-O-methyl uridine
  modified_base 45: mod_base = OTHER; note = 2'-O-methyl uridine phosphorothioate
  modified_base 46: mod_base = OTHER; note = 2'-O-methyl uridine phosphorothioate
  modified_base 47: mod_base = OTHER; note = 2'-O-methyl cytidine phosphorothioate
  modified_base 48: mod_base = OTHER; note = 2'-O-methyl guanosine
  misc_feature 1..6: note = RNA
  misc_feature 7: note = DNA
  misc_feature 8..35: note = RNA
  misc_feature 36..37: note = DNA
  misc_feature 38..48: note = RNA

SEQ ID NO: 85 - DNA, 48 bp, synthetic construct; identical to SEQ ID NO: 14
  source 1..48: mol_type = other DNA
  misc_difference 1: note = Any 2'-O-methyl nucleotide with a 3' phosphorothioate attached
  misc_difference 2: note = Any 2'-O-methyl nucleotide with a 3' phosphorothioate attached
  misc_difference 3: note = Any 2'-O-methyl nucleotide with a 3' phosphorothioate attached
  misc_difference 4: note = Any 2'-O-methyl nucleotide
  misc_difference 5: note = Any 2'-O-methyl nucleotide
  misc_difference 6: note = Any 2'-O-methyl nucleotide
  misc_difference 7: note = Any nucleotide with a 3' phosphorothioate attached
  misc_difference 8: note = Any 2'-O-methyl nucleotide
  misc_difference 9: note = Any 2'-O-methyl nucleotide
  misc_difference 10: note = Any 2'-O-methyl nucleotide
  misc_difference 11: note = Any 2'-O-methyl nucleotide
  misc_difference 12: note = Any 2'-fluoro nucleotide
  misc_difference 13: note = Any 2'-O-methyl nucleotide
  misc_difference 14: note = Any 2'-fluoro nucleotide
  misc_difference 15: note = Any 2'-O-methyl nucleotide
  misc_difference 16: note = Any 2'-fluoro nucleotide
  misc_difference 17: note = Any 2'-O-methyl nucleotide
  misc_difference 18: note = Any 2'-O-methyl nucleotide
  misc_difference 19: note = Any 2'-fluoro nucleotide
  misc_difference 20: note = Any 2'-O-methyl nucleotide
  misc_difference 21: note = Any 2'-fluoro nucleotide
  misc_difference 22: note = Any 2'-O-methyl nucleotide
  misc_difference 23: note = Any 2'-O-methyl nucleotide
  misc_difference 24: note = Any 2'-O-methyl nucleotide
  modified_base 25: mod_base = OTHER; note = 2'-O-methyl guanosine
  modified_base 28: mod_base = OTHER; note = 2'-O-methyl guanosine
  modified_base 29: mod_base = OTHER; note = 2'-O-methyl uridine
  modified_base 30: mod_base = OTHER; note = 2'-O-methyl adenosine
  modified_base 31: mod_base = OTHER; note = 2'-O-methyl guanosine
  modified_base 32: mod_base = OTHER; note = 2'-O-methyl cytidine
  modified_base 35: mod_base = OTHER; note = 2'-O-methyl cytidine
  modified_base 36: mod_base = OTHER; note = 2'-O-methyl cytidine
  modified_base 37: mod_base = OTHER; note = Deoxythymidine phosphorothioate
  modified_base 38: mod_base = OTHER; note = 2'-O-methyl uridine
  modified_base 39: mod_base = OTHER; note = 2'-O-methyl uridine
  modified_base 40: mod_base = OTHER; note = 2'-O-methyl cytidine
  modified_base 41: mod_base = OTHER; note = 2'-O-methyl uridine
  modified_base 42: mod_base = OTHER; note = 2'-O-methyl cytidine
  modified_base 43: mod_base = OTHER; note = 2'-O-methyl adenosine
  modified_base 44: mod_base = OTHER; note = 2'-O-methyl uridine
  modified_base 45: mod_base = OTHER; note = 2'-O-methyl uridine phosphorothioate
  modified_base 46: mod_base = OTHER; note = 2'-O-methyl uridine phosphorothioate
  modified_base 47: mod_base = OTHER; note = 2'-O-methyl cytidine phosphorothioate
  modified_base 48: mod_base = OTHER; note = 2'-O-methyl guanosine
  misc_feature 1..6: note = RNA
  misc_feature 7: note = DNA
  misc_feature 8..36: note = RNA
  misc_feature 37: note = DNA
  misc_feature 38..48: note = RNA

SEQ ID NO: 86 - DNA, 48 bp, synthetic construct; identical to SEQ ID NO: 14
  source 1..48: mol_type = other DNA
  misc_difference 1: note = Any 2'-O-methyl nucleotide with a 3' phosphorothioate attached
  misc_difference 2: note = Any 2'-O-methyl nucleotide with a 3' phosphorothioate attached
  misc_difference 3: note = Any 2'-O-methyl nucleotide with a 3' phosphorothioate attached
  misc_difference 4: note = Any 2'-O-methyl nucleotide
  misc_difference 5: note = Any 2'-O-methyl nucleotide
  misc_difference 6: note = Any 2'-O-methyl nucleotide
  misc_difference 7: note = Any nucleotide with a 3' phosphorothioate attached
  misc_difference 8: note = Any 2'-O-methyl nucleotide
  misc_difference 9: note = Any 2'-O-methyl nucleotide
  misc_difference 10: note = Any 2'-O-methyl nucleotide
  misc_difference 11: note = Any 2'-O-methyl nucleotide
  misc_difference 12: note = Any 2'-fluoro nucleotide
  misc_difference 13: note = Any 2'-O-methyl nucleotide
  misc_difference 14: note = Any 2'-fluoro nucleotide
  misc_difference 15: note = Any 2'-O-methyl nucleotide
  misc_difference 16: note = Any 2'-fluoro nucleotide
  misc_difference 17: note = Any 2'-O-methyl nucleotide
  misc_difference 18: note = Any 2'-O-methyl nucleotide
  misc_difference 19: note = Any 2'-fluoro nucleotide
  misc_difference 20: note = Any 2'-O-methyl nucleotide
  misc_difference 21: note = Any 2'-fluoro nucleotide
  misc_difference 22: note = Any 2'-O-methyl nucleotide
  misc_difference 23: note = Any 2'-O-methyl nucleotide
  misc_difference 24: note = Any 2'-O-methyl nucleotide
  modified_base 25: mod_base = OTHER; note = 2'-O-methyl guanosine
  modified_base 28: mod_base = OTHER; note = 2'-O-methyl guanosine
  modified_base 29: mod_base = OTHER; note = 2'-O-methyl uridine
  modified_base 30: mod_base = OTHER; note = 2'-O-methyl adenosine
  modified_base 31: mod_base = OTHER; note = 2'-O-methyl guanosine
  modified_base 32: mod_base = OTHER; note = 2'-O-methyl cytidine
  modified_base 33: mod_base = OTHER; note = Deoxythymidine phosphorothioate
  modified_base 35: mod_base = OTHER; note = Deoxycytidine phosphorothioate
  modified_base 37: mod_base = OTHER; note = Deoxythymidine phosphorothioate
  modified_base 38: mod_base = OTHER; note = 2'-O-methyl uridine
  modified_base 39: mod_base = OTHER; note = 2'-O-methyl uridine
  modified_base 40: mod_base = OTHER; note = 2'-O-methyl cytidine
  modified_base 41: mod_base = OTHER; note = 2'-O-methyl uridine
  modified_base 42: mod_base = OTHER; note = 2'-O-methyl cytidine
  modified_base 43: mod_base = OTHER; note = 2'-O-methyl adenosine
  modified_base 44: mod_base = OTHER; note = 2'-O-methyl uridine
  modified_base 45: mod_base = OTHER; note = 2'-O-methyl uridine phosphorothioate
  modified_base 46: mod_base = OTHER; note = 2'-O-methyl uridine phosphorothioate
  modified_base 47: mod_base = OTHER; note = 2'-O-methyl cytidine phosphorothioate
  modified_base 48: mod_base = OTHER; note = 2'-O-methyl guanosine
  misc_feature 1..6: note = RNA
  misc_feature 7: note = DNA
  misc_feature 8..32: note = RNA
  misc_feature 33: note = DNA
  misc_feature 34: note = RNA
  misc_feature 35: note = DNA
  misc_feature 36: note = RNA
  misc_feature 37: note = DNA
  misc_feature 38..48: note = RNA

SEQ ID NO: 87 - DNA, 48 bp, synthetic construct; identical to SEQ ID NO: 14
  source 1..48: mol_type = other DNA
  misc_difference 1: note = Any 2'-O-methyl nucleotide with a 3' phosphorothioate attached
  misc_difference 2: note = Any 2'-O-methyl nucleotide with a 3' phosphorothioate attached
  misc_difference 3: note = Any 2'-O-methyl nucleotide with a 3' phosphorothioate attached
  misc_difference 4: note = Any 2'-O-methyl nucleotide
  misc_difference 5: note = Any 2'-O-methyl nucleotide
  misc_difference 6: note = Any 2'-O-methyl nucleotide
  misc_difference 7: note = Any nucleotide with a 3' phosphorothioate attached
  misc_difference 8: note = Any 2'-O-methyl nucleotide
  misc_difference 9: note = Any 2'-O-methyl nucleotide
  misc_difference 10: note = Any 2'-O-methyl nucleotide
  misc_difference 11: note = Any 2'-O-methyl nucleotide
  misc_difference 12: note = Any 2'-fluoro nucleotide
  misc_difference 13: note = Any 2'-O-methyl nucleotide
  misc_difference 14: note = Any 2'-fluoro nucleotide
  misc_difference 15: note = Any 2'-O-methyl nucleotide
  misc_difference 16: note = Any 2'-fluoro nucleotide
  misc_difference 17: note = Any 2'-O-methyl nucleotide
  misc_difference 18: note = Any 2'-O-methyl nucleotide
  misc_difference 19: note = Any 2'-fluoro nucleotide
  misc_difference 20: note = Any 2'-O-methyl nucleotide
  misc_difference 21: note = Any 2'-fluoro nucleotide
  misc_difference 22: note = Any 2'-O-methyl nucleotide
  misc_difference 23: note = Any 2'-O-methyl nucleotide
  misc_difference 24: note = Any 2'-O-methyl nucleotide
  modified_base 25: mod_base = OTHER; note = 2'-O-methyl guanosine
  modified_base 28: mod_base = OTHER; note = 2'-O-methyl guanosine
  modified_base 29: mod_base = OTHER; note = 2'-O-methyl uridine
  modified_base 30: mod_base = OTHER; note = 2'-O-methyl adenosine
  modified_base 31: mod_base = OTHER; note = 2'-O-methyl guanosine
  modified_base 32: mod_base = OTHER; note = 2'-O-methyl cytidine
  modified_base 33: mod_base = OTHER; note = Deoxythymidine phosphorothioate
  modified_base 35: mod_base = OTHER; note = Deoxycytidine phosphorothioate
  modified_base 36: mod_base = OTHER; note = Deoxycytidine phosphorothioate
  modified_base 37: mod_base = OTHER; note = Deoxythymidine phosphorothioate
  modified_base 38: mod_base = OTHER; note = 2'-O-methyl uridine
  modified_base 39: mod_base = OTHER; note = 2'-O-methyl uridine
  modified_base 40: mod_base = OTHER; note = 2'-O-methyl cytidine
  modified_base 41: mod_base = OTHER; note = 2'-O-methyl uridine
  modified_base 42: mod_base = OTHER; note = 2'-O-methyl cytidine
  modified_base 43: mod_base = OTHER; note = 2'-O-methyl adenosine
  modified_base 44: mod_base = OTHER; note = 2'-O-methyl uridine
  modified_base 45: mod_base = OTHER; note = 2'-O-methyl uridine phosphorothioate
  modified_base 46: mod_base = OTHER; note = 2'-O-methyl uridine phosphorothioate
  modified_base 47: mod_base = OTHER; note = 2'-O-methyl cytidine phosphorothioate
  modified_base 48: mod_base = OTHER; note = 2'-O-methyl guanosine
  misc_feature 1..6: note = RNA
  misc_feature 7: note = DNA
  misc_feature 8..32: note = RNA
  misc_feature 33: note = DNA
  misc_feature 34: note = RNA
  misc_feature 35..37: note = DNA
  misc_feature 38..48: note = RNA

SEQ ID NO: 88 - DNA, 48 bp, synthetic construct; identical to SEQ ID NO: 14
  source 1..48: mol_type = other DNA
  misc_difference 1: note = Any 2'-O-methyl nucleotide with a 3' phosphorothioate attached
  misc_difference 2: note = Any 2'-O-methyl nucleotide with a 3' phosphorothioate attached
  misc_difference 3: note = Any 2'-O-methyl nucleotide with a 3' phosphorothioate attached
  misc_difference 4: note = Any 2'-O-methyl nucleotide
  misc_difference 5: note = Any 2'-O-methyl nucleotide
  misc_difference 6: note = Any 2'-O-methyl nucleotide
  misc_difference 7: note = Any nucleotide with a 3' phosphorothioate attached
  misc_difference 8: note = Any 2'-O-methyl nucleotide
  misc_difference 9: note = Any 2'-O-methyl nucleotide
  misc_difference 10: note = Any 2'-O-methyl nucleotide
  misc_difference 11: note = Any 2'-O-methyl nucleotide
  misc_difference 12: note = Any 2'-fluoro nucleotide
  misc_difference 13: note = Any 2'-O-methyl nucleotide
  misc_difference 14: note = Any 2'-fluoro nucleotide
  misc_difference 15: note = Any 2'-O-methyl nucleotide
  misc_difference 16: note = Any 2'-fluoro nucleotide
  misc_difference 17: note = Any 2'-O-methyl nucleotide
  misc_difference 18: note = Any 2'-O-methyl nucleotide
  misc_difference 19: note = Any 2'-fluoro nucleotide
  misc_difference 20: note = Any 2'-O-methyl nucleotide
  misc_difference 21: note = Any 2'-fluoro nucleotide
  misc_difference 22: note = Any 2'-O-methyl nucleotide
  misc_difference 23: note = Any 2'-O-methyl nucleotide
  misc_difference 24: note = Any 2'-O-methyl nucleotide
  modified_base 25: mod_base = OTHER; note = 2'-O-methyl guanosine
  modified_base 28: mod_base = OTHER; note = 2'-O-methyl guanosine
  modified_base 29: mod_base = OTHER; note = 2'-O-methyl uridine
  modified_base 30: mod_base = OTHER; note = 2'-O-methyl adenosine
  modified_base 31: mod_base = OTHER; note = 2'-O-methyl guanosine
  modified_base 32: mod_base = OTHER; note = 2'-O-methyl cytidine
  modified_base 33: mod_base = OTHER; note = Deoxythymidine phosphorothioate
  modified_base 35: mod_base = OTHER; note = 2'-O-methyl cytidine
  modified_base 36: mod_base = OTHER; note = Deoxycytidine phosphorothioate
  modified_base 37: mod_base = OTHER; note = Deoxythymidine phosphorothioate
  modified_base 38: mod_base = OTHER; note = 2'-O-methyl uridine
  modified_base 39: mod_base = OTHER; note = 2'-O-methyl uridine
  modified_base 40: mod_base = OTHER; note = 2'-O-methyl cytidine
  modified_base 41: mod_base = OTHER; note = 2'-O-methyl uridine
  modified_base 42: mod_base = OTHER; note = 2'-O-methyl cytidine
  modified_base 43: mod_base = OTHER; note = 2'-O-methyl adenosine
  modified_base 44: mod_base = OTHER; note = 2'-O-methyl uridine
  modified_base 45: mod_base = OTHER; note = 2'-O-methyl uridine phosphorothioate
  modified_base 46: mod_base = OTHER; note = 2'-O-methyl uridine phosphorothioate
  modified_base 47: mod_base = OTHER; note = 2'-O-methyl cytidine phosphorothioate
  modified_base 48: mod_base = OTHER; note = 2'-O-methyl guanosine
  misc_feature 1..6: note = RNA
  misc_feature 7: note = DNA
  misc_feature 8..32: note = RNA
  misc_feature 33: note = DNA
  misc_feature 34..35: note = RNA
  misc_feature 36..37: note = DNA
  misc_feature 38..48: note = RNA

SEQ ID NO: 89 - DNA, 48 bp, synthetic construct; identical to SEQ ID NO: 14
  source 1..48: mol_type = other DNA
  misc_difference 1: note = Any 2'-O-methyl nucleotide with a 3' phosphorothioate attached
  misc_difference 2: note = Any 2'-O-methyl nucleotide with a 3' phosphorothioate attached
  misc_difference 3: note = Any 2'-O-methyl nucleotide with a 3' phosphorothioate attached
  misc_difference 4: note = Any 2'-O-methyl nucleotide
  misc_difference 5: note = Any 2'-O-methyl nucleotide
  misc_difference 6: note = Any 2'-O-methyl nucleotide
  misc_difference 7: note = Any nucleotide with a 3' phosphorothioate attached
  misc_difference 8: note = Any 2'-O-methyl nucleotide
  misc_difference 9: note = Any 2'-O-methyl nucleotide
  misc_difference 10: note = Any 2'-O-methyl nucleotide
  misc_difference 11: note = Any 2'-O-methyl nucleotide
  misc_difference 12: note = Any 2'-fluoro nucleotide
  misc_difference 13: note = Any 2'-O-methyl nucleotide
  misc_difference 14: note = Any 2'-fluoro nucleotide
  misc_difference 15: note = Any 2'-O-methyl nucleotide
  misc_difference 16: note = Any 2'-fluoro nucleotide
  misc_difference 17: note = Any 2'-O-methyl nucleotide
  misc_difference 18: note = Any 2'-O-methyl nucleotide
  misc_difference 19: note = Any 2'-fluoro nucleotide
  misc_difference 20: note = Any 2'-O-methyl nucleotide
  misc_difference 21: note = Any 2'-fluoro nucleotide
  misc_difference 22: note = Any 2'-O-methyl nucleotide
  misc_difference 23: note = Any 2'-O-methyl nucleotide
  misc_difference 24: note = Any 2'-O-methyl nucleotide
  modified_base 25: mod_base = OTHER; note = 2'-O-methyl guanosine
  modified_base 28: mod_base = OTHER; note = 2'-O-methyl guanosine
  modified_base 29: mod_base = OTHER; note = 2'-O-methyl uridine
  modified_base 30: mod_base = OTHER; note = 2'-O-methyl adenosine
  modified_base 31: mod_base = OTHER; note = 2'-O-methyl guanosine
  modified_base 32: mod_base = OTHER; note = 2'-O-methyl cytidine
  modified_base 33: mod_base = OTHER; note = Deoxythymidine phosphorothioate
  modified_base 35: mod_base = OTHER; note = 2'-O-methyl cytidine
  modified_base 36: mod_base = OTHER; note = 2'-O-methyl cytidine
  modified_base 37: mod_base = OTHER; note = Deoxythymidine phosphorothioate
  modified_base 38: mod_base = OTHER; note = 2'-O-methyl uridine
  modified_base 39: mod_base = OTHER; note = 2'-O-methyl uridine
  modified_base 40: mod_base = OTHER; note = 2'-O-methyl cytidine
  modified_base 41: mod_base = OTHER; note = 2'-O-methyl uridine
  modified_base 42: mod_base = OTHER; note = 2'-O-methyl cytidine
  modified_base 43: mod_base = OTHER; note = 2'-O-methyl adenosine
  modified_base 44: mod_base = OTHER; note = 2'-O-methyl uridine
  modified_base 45: mod_base = OTHER; note = 2'-O-methyl uridine phosphorothioate
  modified_base 46: mod_base = OTHER; note = 2'-O-methyl uridine phosphorothioate
  modified_base 47: mod_base = OTHER; note = 2'-O-methyl cytidine phosphorothioate
  modified_base 48: mod_base = OTHER; note = 2'-O-methyl guanosine
  misc_feature 1..6: note = RNA
  misc_feature 7: note = DNA
  misc_feature 8..32: note = RNA
  misc_feature 33: note = DNA
  misc_feature 34..36: note = RNA
  misc_feature 37: note = DNA
  misc_feature 38..48: note = RNA

SEQ ID NO: 90 - DNA, 48 bp, synthetic construct; identical to SEQ ID NO: 14
  source 1..48: mol_type = other DNA
  misc_difference 1: note = Any 2'-O-methyl nucleotide with a 3' phosphorothioate attached
  misc_difference 2: note = Any 2'-O-methyl nucleotide with a 3' phosphorothioate attached
  misc_difference 3: note = Any 2'-O-methyl nucleotide with a 3' phosphorothioate attached
  misc_difference 4: note = Any 2'-O-methyl nucleotide
  misc_difference 5: note = Any 2'-O-methyl nucleotide
  misc_difference 6: note = Any 2'-O-methyl nucleotide
  misc_difference 7: note = Any nucleotide with a 3' phosphorothioate attached
  misc_difference 8: note = Any 2'-O-methyl nucleotide
  misc_difference 9: note = Any 2'-O-methyl nucleotide
  misc_difference 10: note = Any 2'-O-methyl nucleotide
  misc_difference 11: note = Any 2'-O-methyl nucleotide
  misc_difference 12: note = Any 2'-fluoro nucleotide
  misc_difference 13: note = Any 2'-O-methyl nucleotide
  misc_difference 14: note = Any 2'-fluoro nucleotide
  misc_difference 15: note = Any 2'-O-methyl nucleotide
  misc_difference 16: note = Any 2'-fluoro nucleotide
  misc_difference 17: note = Any 2'-O-methyl nucleotide
  misc_difference 18: note = Any 2'-O-methyl nucleotide
  misc_difference 19: note = Any 2'-fluoro nucleotide
  misc_difference 20: note = Any 2'-O-methyl nucleotide
  misc_difference 21: note = Any 2'-fluoro nucleotide
  misc_difference 22: note = Any 2'-O-methyl nucleotide
  misc_difference 23: note = Any 2'-O-methyl nucleotide
  misc_difference 24: note = Any 2'-O-methyl nucleotide
  modified_base 25: mod_base = OTHER; note = 2'-O-methyl guanosine
  modified_base 26: mod_base = OTHER; note = Deoxythymidine phosphorothioate
  modified_base 28: mod_base = OTHER; note = 2'-O-methyl guanosine
  modified_base 29: mod_base = OTHER; note = 2'-O-methyl uridine
  modified_base 30: mod_base = OTHER; note = 2'-O-methyl adenosine
  modified_base 31: mod_base = OTHER; note = 2'-O-methyl guanosine
  modified_base 32: mod_base = OTHER; note = 2'-O-methyl cytidine
  modified_base 33: mod_base = OTHER; note = Deoxythymidine phosphorothioate
  modified_base 35: mod_base = OTHER; note = Deoxycytidine phosphorothioate
  modified_base 37: mod_base = OTHER; note = Deoxythymidine phosphorothioate
  modified_base 38: mod_base = OTHER; note = 2'-O-methyl uridine
  modified_base 39: mod_base = OTHER; note = 2'-O-methyl uridine
  modified_base 40: mod_base = OTHER; note = 2'-O-methyl cytidine
  modified_base 41: mod_base = OTHER; note = 2'-O-methyl uridine
  modified_base 42: mod_base = OTHER; note = 2'-O-methyl cytidine
  modified_base 43: mod_base = OTHER; note = 2'-O-methyl adenosine
  modified_base 44: mod_base = OTHER; note = 2'-O-methyl uridine
  modified_base 45: mod_base = OTHER; note = 2'-O-methyl uridine phosphorothioate
  modified_base 46: mod_base = OTHER; note = 2'-O-methyl uridine phosphorothioate
  modified_base 47: mod_base = OTHER; note = 2'-O-methyl cytidine phosphorothioate
  modified_base 48: mod_base = OTHER; note = 2'-O-methyl guanosine
  misc_feature 1..6: note = RNA
  misc_feature 7: note = DNA
  misc_feature 8..25: note = RNA
  misc_feature 26: note = DNA
  misc_feature 27..32: note = RNA
  misc_feature 33: note = DNA
  misc_feature 34: note = RNA
  misc_feature 35: note = DNA
  misc_feature 36: note = RNA
  misc_feature 37: note = DNA
  misc_feature 38..48: note = RNA

SEQ ID NO: 91 - DNA, 48 bp, synthetic construct; identical to SEQ ID NO: 14
  source 1..48: mol_type = other DNA
  misc_difference 1: note = Any 2'-O-methyl nucleotide with a 3' phosphorothioate attached
  misc_difference 2: note = Any 2'-O-methyl nucleotide with a 3' phosphorothioate attached
  misc_difference 3: note = Any 2'-O-methyl nucleotide with a 3' phosphorothioate attached
  misc_difference 4: note = Any 2'-O-methyl nucleotide
  misc_difference 5: note = Any 2'-O-methyl nucleotide
  misc_difference 6: note = Any 2'-O-methyl nucleotide
  misc_difference 7: note = Any nucleotide with a 3' phosphorothioate attached
  misc_difference 8: note = Any 2'-O-methyl nucleotide
  misc_difference 9: note = Any 2'-O-methyl nucleotide
  misc_difference 10: note = Any 2'-O-methyl nucleotide
  misc_difference 11: note = Any 2'-O-methyl nucleotide
  misc_difference 12: note = Any 2'-fluoro nucleotide
  misc_difference 13: note = Any 2'-O-methyl nucleotide
  misc_difference 14: note = Any 2'-fluoro nucleotide
  misc_difference 15: note = Any 2'-O-methyl nucleotide
  misc_difference 16: note = Any 2'-fluoro nucleotide
  misc_difference 17: note = Any 2'-O-methyl nucleotide
  misc_difference 18: note = Any 2'-O-methyl nucleotide
  misc_difference 19: note = Any 2'-fluoro nucleotide
  misc_difference 20: note = Any 2'-O-methyl nucleotide
  misc_difference 21: note = Any 2'-fluoro nucleotide
  misc_difference 22: note = Any 2'-O-methyl nucleotide
  misc_difference 23: note = Any 2'-O-methyl nucleotide
  misc_difference 24: note = Any 2'-O-methyl nucleotide
  modified_base 25: mod_base = OTHER; note = 2'-O-methyl guanosine
  modified_base 26: mod_base = OTHER; note = Deoxythymidine phosphorothioate
  modified_base 28: mod_base = OTHER; note = 2'-O-methyl guanosine
  modified_base 29: mod_base = OTHER; note = 2'-O-methyl uridine
  modified_base 30: mod_base = OTHER; note = 2'-O-methyl adenosine
  modified_base 31: mod_base = OTHER; note = 2'-O-methyl guanosine
  modified_base 32: mod_base = OTHER; note = 2'-O-methyl cytidine
  modified_base 33: mod_base = OTHER; note = Deoxythymidine phosphorothioate
  modified_base 35: mod_base = OTHER; note = Deoxycytidine phosphorothioate
  modified_base 36: mod_base = OTHER; note = Deoxycytidine phosphorothioate
  modified_base 37: mod_base = OTHER; note = Deoxythymidine phosphorothioate
  modified_base 38: mod_base = OTHER; note = 2'-O-methyl uridine
  modified_base 39: mod_base = OTHER; note = 2'-O-methyl uridine
  modified_base 40: mod_base = OTHER; note = 2'-O-methyl cytidine
  modified_base 41: mod_base = OTHER; note = 2'-O-methyl uridine
  modified_base 42: mod_base = OTHER; note = 2'-O-methyl cytidine
  modified_base 43: mod_base = OTHER; note = 2'-O-methyl adenosine
  modified_base 44: mod_base = OTHER; note = 2'-O-methyl uridine
  modified_base 45: mod_base = OTHER; note = 2'-O-methyl uridine phosphorothioate
  modified_base 46: mod_base = OTHER; note = 2'-O-methyl uridine phosphorothioate
  modified_base 47: mod_base = OTHER; note = 2'-O-methyl cytidine phosphorothioate
  modified_base 48: mod_base = OTHER; note = 2'-O-methyl guanosine
  misc_feature 1..6: note = RNA
  misc_feature 7: note = DNA
  misc_feature 8..25: note = RNA
  misc_feature 26: note = DNA
  misc_feature 27..32: note = RNA
  misc_feature 33: note = DNA
  misc_feature 34: note = RNA
  misc_feature 35..37: note = DNA
  misc_feature 38..48: note = RNA

SEQ ID NO: 92 - DNA, 48 bp, synthetic construct; identical to SEQ ID NO: 14
  source 1..48: mol_type = other DNA
  misc_difference 1: note = Any 2'-O-methyl nucleotide with a 3' phosphorothioate attached
  misc_difference 2: note = Any 2'-O-methyl nucleotide with a 3' phosphorothioate attached
  misc_difference 3: note = Any 2'-O-methyl nucleotide with a 3' phosphorothioate attached
  misc_difference 4: note = Any 2'-O-methyl nucleotide
  misc_difference 5: note = Any 2'-O-methyl nucleotide
  misc_difference 6: note = Any 2'-O-methyl nucleotide
  misc_difference 7: note = Any nucleotide with a 3' phosphorothioate attached
  misc_difference 8: note = Any 2'-O-methyl nucleotide
  misc_difference 9: note = Any 2'-O-methyl nucleotide
  misc_difference 10: note = Any 2'-O-methyl nucleotide
  misc_difference 11: note = Any 2'-O-methyl nucleotide
  misc_difference 12: note = Any 2'-fluoro nucleotide
  misc_difference 13: note = Any 2'-O-methyl nucleotide
  misc_difference 14: note = Any 2'-fluoro nucleotide
  misc_difference 15: note = Any 2'-O-methyl nucleotide
  misc_difference 16: note = Any 2'-fluoro nucleotide
  misc_difference 17: note = Any 2'-O-methyl nucleotide
  misc_difference 18: note = Any 2'-O-methyl nucleotide
  misc_difference 19: note = Any 2'-fluoro nucleotide
  misc_difference 20: note = Any 2'-O-methyl nucleotide
  misc_difference 21: note = Any 2'-fluoro nucleotide
  misc_difference 22: note = Any 2'-O-methyl nucleotide
  misc_difference 23: note = Any 2'-O-methyl nucleotide
  misc_difference 24: note = Any 2'-O-methyl nucleotide
  modified_base 25: mod_base = OTHER; note = 2'-O-methyl guanosine
  modified_base 26: mod_base = OTHER; note = Deoxythymidine phosphorothioate
  modified_base 28: mod_base = OTHER; note = 2'-O-methyl guanosine
  modified_base 29: mod_base = OTHER; note = 2'-O-methyl uridine
  modified_base 30: mod_base = OTHER; note = 2'-O-methyl adenosine
  modified_base 31: mod_base = OTHER; note = 2'-O-methyl guanosine
  modified_base 32: mod_base = OTHER; note = 2'-O-methyl cytidine
  modified_base 33: mod_base = OTHER; note = Deoxythymidine phosphorothioate
  modified_base 35: mod_base = OTHER; note = 2'-O-methyl cytidine
  modified_base 36: mod_base = OTHER; note = Deoxycytidine phosphorothioate
  modified_base 37: mod_base = OTHER; note = Deoxythymidine phosphorothioate
  modified_base 38: mod_base = OTHER; note = 2'-O-methyl uridine
  modified_base 39: mod_base = OTHER; note = 2'-O-methyl uridine
  modified_base 40: mod_base = OTHER; note = 2'-O-methyl cytidine
  modified_base 41: mod_base = OTHER; note = 2'-O-methyl uridine
  modified_base 42: mod_base = OTHER; note = 2'-O-methyl cytidine
  modified_base 43: mod_base = OTHER; note = 2'-O-methyl adenosine
  modified_base 44: mod_base = OTHER; note = 2'-O-methyl uridine
  modified_base 45: mod_base = OTHER; note = 2'-O-methyl uridine phosphorothioate
  modified_base 46: mod_base = OTHER; note = 2'-O-methyl uridine phosphorothioate
  modified_base 47: mod_base = OTHER; note = 2'-O-methyl cytidine phosphorothioate
  modified_base 48: mod_base = OTHER; note = 2'-O-methyl guanosine
  misc_feature 1..6: note = RNA
  misc_feature 7: note = DNA
  misc_feature 8..25: note = RNA
  misc_feature 26: note = DNA
  misc_feature 27..32: note = RNA
  misc_feature 33: note = DNA
  misc_feature 34..35: note = RNA
  misc_feature 36..37: note = DNA
  misc_feature 38..48: note = RNA

SEQ ID NO: 93 - DNA, 48 bp, synthetic construct; identical to SEQ ID NO: 14
  source 1..48: mol_type = other DNA
  misc_difference 1: note = Any 2'-O-methyl nucleotide with a 3' phosphorothioate attached
  misc_difference 2: note = Any 2'-O-methyl nucleotide with a 3' phosphorothioate attached
  misc_difference 3: note = Any 2'-O-methyl nucleotide with a 3' phosphorothioate attached
  misc_difference 4: note = Any 2'-O-methyl nucleotide
  misc_difference 5: note = Any 2'-O-methyl nucleotide
  misc_difference 6: note = Any 2'-O-methyl nucleotide
  misc_difference 7: note = Any nucleotide with a 3' phosphorothioate attached
  misc_difference 8: note = Any 2'-O-methyl nucleotide
  misc_difference 9: note = Any 2'-O-methyl nucleotide
  misc_difference 10: note = Any 2'-O-methyl nucleotide
  misc_difference 11: note = Any 2'-O-methyl nucleotide
  misc_difference 12: note = Any 2'-fluoro nucleotide
  misc_difference 13: note = Any 2'-O-methyl nucleotide
  misc_difference 14: note = Any 2'-fluoro nucleotide
  misc_difference 15: note = Any 2'-O-methyl nucleotide
  misc_difference 16: note = Any 2'-fluoro nucleotide
  misc_difference 17: note = Any 2'-O-methyl nucleotide
  misc_difference 18: note = Any 2'-O-methyl nucleotide
  misc_difference 19: note = Any 2'-fluoro nucleotide
  misc_difference 20: note = Any 2'-O-methyl nucleotide
  misc_difference 21: note = Any 2'-fluoro nucleotide
  misc_difference 22: note = Any 2'-O-methyl nucleotide
  misc_difference 23: note = Any 2'-O-methyl nucleotide
  misc_difference 24: note = Any 2'-O-methyl nucleotide
  modified_base 25: mod_base = OTHER; note = 2'-O-methyl guanosine
  modified_base 26: mod_base = OTHER; note = Deoxythymidine phosphorothioate
  modified_base 28: mod_base = OTHER; note = 2'-O-methyl guanosine
  modified_base 29: mod_base = OTHER; note = 2'-O-methyl uridine
  modified_base 30: mod_base = OTHER; note = 2'-O-methyl adenosine
  modified_base 31: mod_base = OTHER; note = 2'-O-methyl guanosine
  modified_base 32: mod_base = OTHER; note = 2'-O-methyl cytidine
  modified_base 33: mod_base = OTHER; note = Deoxythymidine phosphorothioate
  modified_base 35: mod_base = OTHER; note = 2'-O-methyl cytidine
  modified_base 36: mod_base = OTHER; note = 2'-O-methyl cytidine
  modified_base 37: mod_base = OTHER; note = Deoxythymidine phosphorothioate
  modified_base 38: mod_base = OTHER; note = 2'-O-methyl uridine
  modified_base 39: mod_base = OTHER; note = 2'-O-methyl uridine
  modified_base 40: mod_base = OTHER; note = 2'-O-methyl cytidine
  modified_base 41: mod_base = OTHER; note = 2'-O-methyl uridine
  modified_base 42: mod_base = OTHER; note = 2'-O-methyl cytidine
  modified_base 43: mod_base = OTHER; note = 2'-O-methyl adenosine
  modified_base 44: mod_base = OTHER; note = 2'-O-methyl uridine
  modified_base 45: mod_base = OTHER; note = 2'-O-methyl uridine phosphorothioate
  modified_base 46: mod_base = OTHER; note = 2'-O-methyl uridine phosphorothioate
  modified_base 47: mod_base = OTHER; note = 2'-O-methyl cytidine phosphorothioate
  modified_base 48: mod_base = OTHER; note = 2'-O-methyl guanosine
  misc_feature 1..6: note = RNA
  misc_feature 7: note = DNA
  misc_feature 8..25: note = RNA
  misc_feature 26: note = DNA
  misc_feature 27..32: note = RNA
  misc_feature 33: note = DNA
  misc_feature 34..36: note = RNA
  misc_feature 37: note = DNA
  misc_feature 38..48: note = RNA

SEQ ID NO: 94 - RNA, 93 nt, synthetic construct
  source 1..93: mol_type = other RNA
  modified_base 1: mod_base = OTHER; note = 2'-O-methyl cytidine phosphorothioate
  modified_base 2: mod_base = OTHER; note = 2'-O-methyl guanosine phosphorothioate
  modified_base 3: mod_base = OTHER; note = 2'-O-methyl adenosine phosphorothioate
  modified_base 90: mod_base = OTHER; note = Uridine phosphorothioate
  modified_base 91: mod_base = OTHER; note = 2'-O-methyl uridine phosphorothioate
  modified_base 92: mod_base = OTHER; note = 2'-O-methyl uridine phosphorothioate
  modified_base 93: mod_base = OTHER; note = 2'-O-methyl adenosine
cgaaatgagaaccgttgctacaataaggccgtctgaaaagatgtgccgcaacgctctgccccttaaagctcctgctttaaggggcatcgttta

SEQ ID NO: 95 - RNA, 93 nt, synthetic construct; identical to SEQ ID NO: 94
  source 1..93: mol_type = other RNA
  modified_base 1: mod_base = OTHER; note = 2'-O-methyl cytidine phosphorothioate
  modified_base 2: mod_base = OTHER; note = 2'-O-methyl guanosine phosphorothioate
  modified_base 3: mod_base = OTHER; note = 2'-O-methyl adenosine phosphorothioate
  modified_base 35: mod_base = OTHER; note = 2'-O-methyl guanosine
  modified_base 36: mod_base = OTHER; note = 2'-O-methyl adenosine
  modified_base 37: mod_base = OTHER; note = 2'-O-methyl adenosine
  modified_base 38: mod_base = OTHER; note = 2'-O-methyl adenosine
  modified_base 70: mod_base = OTHER; note = 2'-O-methyl uridine
  modified_base 71: mod_base = OTHER; note = 2'-O-methyl cytidine
  modified_base 72: mod_base = OTHER; note = 2'-O-methyl cytidine
  modified_base 73: mod_base = OTHER; note = 2'-O-methyl uridine
  modified_base 90: mod_base = OTHER; note = Uridine phosphorothioate
  modified_base 91: mod_base = OTHER; note = 2'-O-methyl uridine phosphorothioate
  modified_base 92: mod_base = OTHER; note = 2'-O-methyl uridine phosphorothioate
  modified_base 93: mod_base = OTHER; note = 2'-O-methyl adenosine

SEQ ID NO: 96 - RNA, 93 nt, synthetic construct; identical to SEQ ID NO: 94
  source 1..93: mol_type = other RNA
  modified_base 1: mod_base = OTHER; note = 2'-O-methyl cytidine phosphorothioate
  modified_base 2: mod_base = OTHER; note = 2'-O-methyl guanosine phosphorothioate
  modified_base 3: mod_base = OTHER; note = 2'-O-methyl adenosine phosphorothioate
  modified_base 4: mod_base = OTHER; note = 2'-O-methyl adenosine
  modified_base 5: mod_base = OTHER; note = 2'-O-methyl adenosine
  modified_base 6: mod_base = OTHER; note = 2'-O-methyl uridine
  modified_base 7: mod_base = OTHER; note = 2'-O-methyl guanosine
  modified_base 8: mod_base = OTHER; note = 2'-O-methyl adenosine
  modified_base 9: mod_base = OTHER; note = 2'-O-methyl guanosine
  modified_base 10: mod_base = OTHER; note = 2'-O-methyl adenosine
  modified_base 11: mod_base = OTHER; note = 2'-O-methyl adenosine
  modified_base 12: mod_base = OTHER; note = 2'-O-methyl cytidine
  modified_base 32: mod_base = OTHER; note = 2'-O-methyl uridine
  modified_base 33: mod_base = OTHER; note = 2'-O-methyl cytidine
  modified_base 34: mod_base = OTHER; note = 2'-O-methyl uridine
  modified_base 35: mod_base = OTHER; note = 2'-O-methyl guanosine
  modified_base 36: mod_base = OTHER; note = 2'-O-methyl adenosine
  modified_base 37: mod_base = OTHER; note = 2'-O-methyl adenosine
  modified_base 38: mod_base = OTHER; note = 2'-O-methyl adenosine
  modified_base 39: mod_base = OTHER; note = 2'-O-methyl adenosine
  modified_base 40: mod_base = OTHER; note = 2'-O-methyl guanosine
  modified_base 61: mod_base = OTHER; note = 2'-O-methyl cytidine
  modified_base 62: mod_base = OTHER; note = 2'-O-methyl cytidine
  modified_base 63: mod_base = OTHER; note = 2'-O-methyl uridine
  modified_base 64: mod_base = OTHER; note = 2'-O-methyl uridine
  modified_base 65: mod_base = OTHER; note = 2'-O-methyl adenosine
  modified_base 66: mod_base = OTHER; note = 2'-O-methyl adenosine
  modified_base 67: mod_base = OTHER; note = 2'-O-methyl adenosine
  modified_base 68: mod_base = OTHER; note = 2'-O-methyl guanosine
  modified_base 69: mod_base = OTHER; note = 2'-O-methyl cytidine
  modified_base 70: mod_base = OTHER; note = 2'-O-methyl uridine
  modified_base 71: mod_base = OTHER; note = 2'-O-methyl cytidine
  modified_base 72: mod_base = OTHER; note = 2'-O-methyl cytidine
  modified_base 73: mod_base = OTHER; note = 2'-O-methyl uridine
  modified_base 74: mod_base = OTHER; note = 2'-O-methyl guanosine
  modified_base 75: mod_base = OTHER; note = 2'-O-methyl cytidine
  modified_base 76: mod_base = OTHER; note = 2'-O-methyl uridine
  modified_base 77: mod_base = OTHER; note = 2'-O-methyl uridine
  modified_base 78: mod_base = OTHER; note = 2'-O-methyl uridine
  modified_base 79: mod_base = OTHER; note = 2'-O-methyl adenosine
  modified_base 80: mod_base = OTHER; note = 2'-O-methyl adenosine
  modified_base 81: mod_base = OTHER; note = 2'-O-methyl guanosine
  modified_base 82: mod_base = OTHER; note = 2'-O-methyl guanosine
  modified_base 88: mod_base = OTHER; note = 2'-O-methyl cytidine
  modified_base 89: mod_base = OTHER; note = 2'-O-methyl guanosine
  modified_base 90: mod_base = OTHER; note = 2'-O-methyl uridine phosphorothioate
  modified_base 91: mod_base = OTHER; note = 2'-O-methyl uridine phosphorothioate
  modified_base 92: mod_base = OTHER; note = 2'-O-methyl uridine phosphorothioate
  modified_base 93: mod_base = OTHER; note = 2'-O-methyl adenosine

SEQ ID NO: 97 - RNA, 147 nt, synthetic construct
  source 1..147: mol_type = other RNA
  misc_difference 1: note = Any nucleotide
  misc_difference 2: note = Any nucleotide
  misc_difference 3: note = Any nucleotide
  misc_difference 4: note = Any nucleotide
  misc_difference 5: note = Any nucleotide
  misc_difference 6: note = Any nucleotide
  misc_difference 7: note = Any nucleotide
  misc_difference 8: note = Any nucleotide
  misc_difference 9: note = Any nucleotide
  misc_difference 10: note = Any nucleotide
  misc_difference 11: note = Any nucleotide
  misc_difference 12: note = Any nucleotide
  misc_difference 13: note = Any nucleotide
  misc_difference 14: note = Any nucleotide
  misc_difference 15: note = Any nucleotide
  misc_difference 16: note = Any nucleotide
  misc_difference 17: note = Any nucleotide
  misc_difference 18: note = Any nucleotide
  misc_difference 19: note = Any nucleotide
  misc_difference 20: note = Any nucleotide
  misc_difference 21: note = Any nucleotide
  misc_difference 22: note = Any nucleotide
  misc_difference 23: note = Any nucleotide
  misc_difference 24: note = Any nucleotide
  misc_difference 25: note = Any nucleotide
  misc_difference 26: note = Any nucleotide
  misc_difference 1..26: note = This region may encompass 18-26 nucleotides
nnnnnnnnnnnnnnnnnnnnnnnnnngttgtagctccctttctcatttcggaaacgaaatgagaaccgttgctacaataaggccgtctgaaaagatgtgccgcaacgctctgccccttaaagcttctgctttaaggggcatcgttta

SEQ ID NO: 98 - RNA, 121 nt, synthetic construct
  source 1..121: mol_type = other RNA
  misc_difference 1: note = Any nucleotide
  misc_difference 2: note = Any nucleotide
  misc_difference 3: note = Any nucleotide
  misc_difference 4: note = Any nucleotide
  misc_difference 5: note = Any nucleotide
  misc_difference 6: note = Any nucleotide
  misc_difference 7: note = Any nucleotide
  misc_difference 8: note = Any nucleotide
  misc_difference 9: note = Any nucleotide
  misc_difference 10: note = Any nucleotide
  misc_difference 11: note = Any nucleotide
  misc_difference 12: note = Any nucleotide
  misc_difference 13: note = Any nucleotide
  misc_difference 14: note = Any nucleotide
  misc_difference 15: note = Any nucleotide
  misc_difference 16: note = Any nucleotide
  misc_difference 17: note = Any nucleotide
  misc_difference 18: note = Any nucleotide
  misc_difference 19: note = Any nucleotide
  misc_difference 20: note = Any nucleotide
  misc_difference 21: note = Any nucleotide
  misc_difference 22: note = Any nucleotide
  misc_difference 23: note = Any nucleotide
  misc_difference 24: note = Any nucleotide
  misc_difference 25: note = Any nucleotide
  misc_difference 26: note = Any nucleotide
  misc_difference 1..26: note = This region may encompass 18-26 nucleotides
nnnnnnnnnnnnnnnnnnnnnnnnnngttgtagctcccgaaacgttgctacaataaggccgtctgaaaagatgtgccgcaacgctctgccccttaaagcttctgctttaaggggcatcgtt

SEQ ID NO: 99 - RNA, 123 nt, synthetic construct
  source 1..123: mol_type = other RNA
  misc_difference 1: note = Any nucleotide
  misc_difference 2: note = Any nucleotide
  misc_difference 3: note = Any nucleotide
  misc_difference 4: note = Any nucleotide
  misc_difference 5: note = Any nucleotide
  misc_difference 6: note = Any nucleotide
  misc_difference 7: note = Any nucleotide
  misc_difference 8: note = Any nucleotide
  misc_difference 9: note = Any nucleotide
  misc_difference 10: note = Any nucleotide
  misc_difference 11: note = Any nucleotide
  misc_difference 12: note = Any nucleotide
  misc_difference 13: note = Any nucleotide
  misc_difference 14: note = Any nucleotide
  misc_difference 15: note = Any nucleotide
  misc_difference 16: note = Any nucleotide
  misc_difference 17: note = Any nucleotide
  misc_difference 18: note = Any nucleotide
  misc_difference 19: note = Any nucleotide
  misc_difference 20: note = Any nucleotide
  misc_difference 21: note = Any nucleotide
  misc_difference 22: note = Any nucleotide
  misc_difference 23: note = Any nucleotide
  misc_difference 24: note = Any nucleotide
  misc_difference 25: note = Any nucleotide
  misc_difference 26: note = Any nucleotide
  misc_difference 1..26: note = This region may encompass 18-26 nucleotides
nnnnnnnnnnnnnnnnnnnnnnnnnngttgtagctcccgaaacgttgctacaataaggccgtctgaaaagatgtgccgcaacgctctgccccttaaagcttctgctttaaggggcatcgttta

SEQ ID NO: 100 - RNA, 113 nt, synthetic construct
  source 1..113: mol_type = other RNA
  misc_difference 1: note = Any nucleotide
  misc_difference 2: note = Any nucleotide
  misc_difference 3: note = Any nucleotide
  misc_difference 4: note = Any nucleotide
  misc_difference 5: note = Any nucleotide
  misc_difference 6: note = Any nucleotide
  misc_difference 7: note = Any nucleotide
  misc_difference 8: note = Any nucleotide
  misc_difference 9: note = Any nucleotide
  misc_difference 10: note = Any nucleotide
  misc_difference 11: note = Any nucleotide
  misc_difference 12: note = Any nucleotide
  misc_difference 13: note = Any nucleotide
  misc_difference 14: note = Any nucleotide
  misc_difference 15: note = Any nucleotide
  misc_difference 16: note = Any nucleotide
  misc_difference 17: note = Any nucleotide
  misc_difference 18: note = Any nucleotide
  misc_difference 19: note = Any nucleotide
  misc_difference 20: note = Any nucleotide
  misc_difference 21: note = Any nucleotide
  misc_difference 22: note = Any nucleotide
  misc_difference 23: note = Any nucleotide
  misc_difference 24: note = Any nucleotide
  misc_difference 25: note = Any nucleotide
  misc_difference 26: note = Any nucleotide
  misc_difference 1..26: note = This region may encompass 18-26 nucleotides
nnnnnnnnnnnnnnnnnnnnnnnnnngttgtagctcccgaaacgttgctacaataaggccgtctgaaaagatgtgccgcaacgctctgccccttttctaaggggcatcgttta

SEQ ID NO: 101 - RNA, 109 nt, synthetic construct
  source 1..109: mol_type = other RNA
  misc_difference 1: note = Any nucleotide
  misc_difference 2: note = Any nucleotide
  misc_difference 3: note = Any nucleotide
  misc_difference 4: note = Any nucleotide
  misc_difference 5: note = Any nucleotide
  misc_difference 6: note = Any nucleotide
  misc_difference 7: note = Any nucleotide
  misc_difference 8: note = Any nucleotide
  misc_difference 9: note = Any nucleotide
  misc_difference 10: note = Any nucleotide
  misc_difference 11: note = Any nucleotide
  misc_difference 12: note = Any nucleotide
  misc_difference 13: note = Any nucleotide
  misc_difference 14: note = Any nucleotide
  misc_difference 15: note = Any nucleotide
  misc_difference 16: note = Any nucleotide
  misc_difference 17: note = Any nucleotide
  misc_difference 18: note = Any nucleotide
  misc_difference 19: note = Any nucleotide
  misc_difference 20: note = Any nucleotide
  misc_difference 21: note = Any nucleotide
  misc_difference 22: note = Any nucleotide
  misc_difference 23: note = Any nucleotide
  misc_difference 24: note = Any nucleotide
  misc_difference 25: note = Any nucleotide
  misc_difference 26: note = Any nucleotide
  misc_difference 1..26: note = This region may encompass 18-26 nucleotides
nnnnnnnnnnnnnnnnnnnnnnnnnngttgtagctcccgaaacgttgctacaataaggccgtctgaaaagatgtgccgcaacgctctgcccctttctaggggcatcgtt

SEQ ID NO: 102 - RNA, 107 nt, synthetic construct
  source 1..107: mol_type = other RNA
  misc_difference 1: note = Any nucleotide
  misc_difference 2: note = Any nucleotide
  misc_difference 3: note = Any nucleotide
  misc_difference 4: note = Any nucleotide
  misc_difference 5: note = Any nucleotide
  misc_difference 6: note = Any nucleotide
  misc_difference 7: note = Any nucleotide
  misc_difference 8: note = Any nucleotide
  misc_difference 9: note = Any nucleotide
  misc_difference 10: note = Any nucleotide
  misc_difference 11: note = Any nucleotide
  misc_difference 12: note = Any nucleotide
  misc_difference 13: note = Any nucleotide
  misc_difference 14: note = Any nucleotide
  misc_difference 15: note = Any nucleotide
  misc_difference 16: note = Any nucleotide
  misc_difference 17: note = Any nucleotide
  misc_difference 18: note = Any nucleotide
  misc_difference 19: note = Any nucleotide
  misc_difference 20: note = Any nucleotide
  misc_difference 21: note = Any nucleotide
  misc_difference 22: note = Any nucleotide
  misc_difference 23: note = Any nucleotide
  misc_difference 24: note = Any nucleotide
  misc_difference 25: note = Any nucleotide
  misc_difference 26: note = Any nucleotide
  misc_difference 1..26: note = This region may encompass 18-26 nucleotides
nnnnnnnnnnnnnnnnnnnnnnnnnngttgtagctcccgaaacgttgctacaataaggccgtctgaaaagatgtgccgcaacgctctgccccttctggggcatcgtt

SEQ ID NO: 103 - RNA, 107 nt, synthetic construct
  source 1..107: mol_type = other RNA
  misc_difference 1: note = Any nucleotide
  misc_difference 2: note = Any nucleotide
  misc_difference 3: note = Any nucleotide
  misc_difference 4: note = Any nucleotide
  misc_difference 5: note = Any nucleotide
  misc_difference 6: note = Any nucleotide
  misc_difference 7: note = Any nucleotide
  misc_difference 8: note = Any nucleotide
  misc_difference 9: note = Any nucleotide
  misc_difference 10: note = Any nucleotide
  misc_difference 11: note = Any nucleotide
  misc_difference 12: note = Any nucleotide
  misc_difference 13: note = Any nucleotide
  misc_difference 14: note = Any nucleotide
  misc_difference 15: note = Any nucleotide
  misc_difference 16: note = Any nucleotide
  misc_difference 17: note = Any nucleotide
  misc_difference 18: note = Any nucleotide
  misc_difference 19: note = Any nucleotide
  misc_difference 20: note = Any nucleotide
  misc_difference 21: note = Any nucleotide
  misc_difference 22: note = Any nucleotide
  misc_difference 23: note = Any nucleotide
  misc_difference 24: note = Any nucleotide
  misc_difference 25: note = Any nucleotide
  misc_difference 26: note = Any nucleotide
  misc_difference 1..26: note = This region may encompass 18-26 nucleotides
nnnnnnnnnnnnnnnnnnnnnnnnnngttgtagctcccgaaacgttgctacaataaggccgtctgaaaagatgtgccgcaacgctctgccccttttctaaggggcat

SEQ ID NO: 104 - RNA, 105 nt, synthetic construct
  source 1..105: mol_type = other RNA
  misc_difference 1: note = Any nucleotide
  misc_difference 2: note = Any nucleotide
  misc_difference 3: note = Any nucleotide
  misc_difference 4: note = Any nucleotide
  misc_difference 5: note = Any nucleotide
  misc_difference 6: note = Any nucleotide
  misc_difference 7: note = Any nucleotide
  misc_difference 8: note = Any nucleotide
  misc_difference 9: note = Any nucleotide
  misc_difference 10: note = Any nucleotide
  misc_difference 11: note = Any nucleotide
  misc_difference 12: note = Any nucleotide
  misc_difference 13: note = Any nucleotide
  misc_difference 14: note = Any nucleotide
  misc_difference 15: note = Any nucleotide
  misc_difference 16: note = Any nucleotide
  misc_difference 17: note = Any nucleotide
  misc_difference 18: note = Any nucleotide
  misc_difference 19: note = Any nucleotide
  misc_difference 20: note = Any nucleotide
  misc_difference 21: note = Any nucleotide
  misc_difference 22: note = Any nucleotide
  misc_difference 23: note = Any nucleotide
  misc_difference 24: note = Any nucleotide
  misc_difference 25: note = Any nucleotide
  misc_difference 26: note = Any nucleotide
  misc_difference 1..26: note = This region may encompass 18-26 nucleotides
nnnnnnnnnnnnnnnnnnnnnnnnnngttgtagctcccgaaacgttgctacaataaggccgtctgaaaagatgtgccgcaacgctctgccttctggcatcgttta

SEQ ID NO: 105 - RNA, 105 nt, synthetic construct
  source 1..105: mol_type = other RNA
  misc_difference 1: note = Any nucleotide
  misc_difference 2: note = Any nucleotide
  misc_difference 3: note = Any nucleotide
  misc_difference 4: note = Any nucleotide
  misc_difference 5: note = Any nucleotide
  misc_difference 6: note = Any nucleotide
  misc_difference 7: note = Any nucleotide
  misc_difference 8: note = Any nucleotide
  misc_difference 9: note = Any nucleotide
  misc_difference 10: note = Any nucleotide
  misc_difference 11: note = Any nucleotide
  misc_difference 12: note = Any nucleotide
  misc_difference 13: note = Any nucleotide
  misc_difference 14: note = Any nucleotide
  misc_difference 15: note = Any nucleotide
  misc_difference 16: note = Any nucleotide
  misc_difference 17: note = Any nucleotide
  misc_difference 18: note = Any nucleotide
  misc_difference 19: note = Any nucleotide
  misc_difference 20: note = Any nucleotide
  misc_difference 21: note = Any nucleotide
  misc_difference 22: note = Any nucleotide
  misc_difference 23: note = Any nucleotide
  misc_difference 24: note = Any nucleotide
  misc_difference 25: note = Any nucleotide
  misc_difference 26: note = Any nucleotide
  misc_difference 1..26: note = This region may encompass 18-26 nucleotides
nnnnnnnnnnnnnnnnnnnnnnnnnngttgtagctcccgaaacgttgctacaataaggccgtctgaaaagatgtgccgcaacgctctgcccttctgggcatcgtt

SEQ ID NO: 106 - RNA, 103 nt, synthetic construct
  source 1..103: mol_type = other RNA
  misc_difference 1: note = Any nucleotide
  misc_difference 2: note = Any nucleotide
  misc_difference 3: note = Any nucleotide
  misc_difference 4: note = Any nucleotide
  misc_difference 5: note = Any nucleotide
  misc_difference 6: note = Any nucleotide
  misc_difference 7: note = Any nucleotide
  misc_difference 8: note = Any nucleotide
  misc_difference 9: note = Any nucleotide
  misc_difference 10: note = Any nucleotide
  misc_difference 11: note = Any nucleotide
  misc_difference 12: note = Any nucleotide
  misc_difference 13: note = Any nucleotide
  misc_difference 14: note = Any nucleotide
  misc_difference 15: note = Any nucleotide
  misc_difference 16: note = Any nucleotide
  misc_difference 17: note = Any nucleotide
  misc_difference 18: note = Any nucleotide
  misc_difference 19: note = Any nucleotide
  misc_difference 20: note = Any nucleotide
  misc_difference 21: note = Any nucleotide
  misc_difference 22: note = Any nucleotide
  misc_difference 23: note = Any nucleotide
  misc_difference 24: note = Any nucleotide
  misc_difference 25: note = Any nucleotide
  misc_difference 26: note = Any nucleotide
  misc_difference 1..26: note = This region may encompass 18-26 nucleotides
nnnnnnnnnnnnnnnnnnnnnnnnnngttgtagctcccgaaacgttgctacaataaggccgtctgaaaagatgtgccgcaacgctctgcttctgcatcgttta

SEQ ID NO: 107 - RNA, 101 nt, synthetic construct
  source 1..101: mol_type = other RNA
  misc_difference 1: note = Any nucleotide
  misc_difference 2: note = Any nucleotide
  misc_difference 3: note = Any nucleotide
  misc_difference 4: note = Any nucleotide
  misc_difference 5: note = Any nucleotide
  misc_difference 6: note = Any nucleotide
  misc_difference 7: note = Any nucleotide
  misc_difference 8: note = Any nucleotide
  misc_difference 9: note = Any nucleotide
  misc_difference 10: note = Any nucleotide
  misc_difference 11: note = Any nucleotide
  misc_difference 12: note = Any nucleotide
  misc_difference 13: note = Any nucleotide
  misc_difference 14: note = Any nucleotide
  misc_difference 15: note = Any nucleotide
  misc_difference 16: note = Any nucleotide
  misc_difference 17: note = Any nucleotide
  misc_difference 18: note = Any nucleotide
  misc_difference 19: note = Any nucleotide
  misc_difference 20: note = Any nucleotide
  misc_difference 21: note = Any nucleotide
  misc_difference 22: note = Any nucleotide
  misc_difference 23: note = Any nucleotide
  misc_difference 24: note = Any nucleotide
  misc_difference 25: note = Any nucleotide
  misc_difference 26: note = Any nucleotide
  misc_difference 1..26: note = This region may encompass 18-26 nucleotides
nnnnnnnnnnnnnnnnnnnnnnnnnngttgtagctcccgaaacgttgctacaataaggccgtctgaaaagatgtgccgcaacgctctgcttctgcatcgtt

SEQ ID NO: 108 - RNA, 103 nt, synthetic construct
  source 1..103: mol_type = other RNA
  misc_difference 1: note = Any 2'-O-methyl nucleotide with a 3' phosphorothioate attached
  misc_difference 2: note = Any 2'-O-methyl nucleotide with a 3' phosphorothioate attached
  misc_difference 3: note = Any 2'-O-methyl nucleotide with a 3' phosphorothioate attached
  misc_difference 4: note = Any nucleotide
  misc_difference 5: note = Any nucleotide
  misc_difference 6: note = Any nucleotide
  misc_difference 7: note = Any nucleotide
  misc_difference 8: note = Any nucleotide
  misc_difference 9: note = Any nucleotide
  misc_difference 10: note = Any nucleotide
  misc_difference 11: note = Any nucleotide
  misc_difference 12: note = Any nucleotide
  misc_difference 13: note = Any nucleotide
  misc_difference 14: note = Any nucleotide
  misc_difference 15: note = Any nucleotide
  misc_difference 16: note = Any nucleotide
  misc_difference 17: note = Any nucleotide
  misc_difference 18: note = Any nucleotide
  misc_difference 19: note = Any nucleotide
  misc_difference 20: note = Any nucleotide
  misc_difference 21: note = Any nucleotide
  misc_difference 22: note = Any nucleotide
  misc_difference 23: note = Any nucleotide
  misc_difference 24: note = Any nucleotide
  modified_base 37: mod_base = OTHER; note = 2'-O-methyl guanosine
  modified_base 38: mod_base = OTHER; note = 2'-O-methyl adenosine
  modified_base 39: mod_base = OTHER; note = 2'-O-methyl adenosine
  modified_base 40: mod_base = OTHER; note = 2'-O-methyl adenosine
  modified_base 61: mod_base = OTHER; note = 2'-O-methyl cytidine
  modified_base 62: mod_base = OTHER; note = 2'-O-methyl uridine
  modified_base 63: mod_base = OTHER; note = 2'-O-methyl guanosine
  modified_base 64: mod_base = OTHER; note = 2'-O-methyl adenosine
  modified_base 65: mod_base = OTHER; note = 2'-O-methyl adenosine
  modified_base 66: mod_base = OTHER; note = 2'-O-methyl adenosine
  modified_base 67: mod_base = OTHER; note = 2'-O-methyl adenosine
  modified_base 68: mod_base = OTHER; note = 2'-O-methyl guanosine
  modified_base 89: mod_base = OTHER; note = 2'-O-methyl uridine
  modified_base 90: mod_base = OTHER; note = 2'-O-methyl uridine
  modified_base 91: mod_base = OTHER; note = 2'-O-methyl cytidine
  modified_base 92: mod_base = OTHER; note = 2'-O-methyl uridine
  modified_base 100: mod_base = OTHER; note = Uridine phosphorothioate
  modified_base 101: mod_base = OTHER; note = 2'-O-methyl uridine phosphorothioate
  modified_base 102: mod_base = OTHER; note = 2'-O-methyl uridine phosphorothioate
  modified_base 103: mod_base = OTHER; note = 2'-O-methyl adenosine
nnnnnnnnnnnnnnnnnnnnnnnngttgtagctcccgaaacgttgctacaataaggccgtctgaaaagatgtgccgcaacgctctgccttctggcatcgttta

SEQ ID NO: 109 - RNA, 103 nt, synthetic construct; identical to SEQ ID NO: 108
  source 1..103: mol_type = other RNA
  misc_difference 1: note = Any 2'-O-methyl nucleotide with a 3' phosphorothioate attached
  misc_difference 2: note = Any 2'-O-methyl nucleotide with a 3' phosphorothioate attached
  misc_difference 3: note = Any 2'-O-methyl nucleotide with a 3' phosphorothioate attached
  misc_difference 4: note = Any nucleotide
  misc_difference 5: note = Any nucleotide
  misc_difference 6: note = Any nucleotide
  misc_difference 7: note = Any nucleotide
  misc_difference 8: note = Any nucleotide
  misc_difference 9: note = Any nucleotide
  misc_difference 10: note = Any nucleotide
  misc_difference 11: note = Any nucleotide
  misc_difference 12: note = Any nucleotide
  misc_difference 13: note = Any nucleotide
  misc_difference 14: note = Any nucleotide
  misc_difference 15: note = Any nucleotide
  misc_difference 16: note = Any nucleotide
  misc_difference 17: note = Any nucleotide
  misc_difference 18: note = Any nucleotide
  misc_difference 19: note = Any nucleotide
  misc_difference 20: note = Any nucleotide
  misc_difference 21: note = Any nucleotide
  misc_difference 22: note = Any nucleotide
  misc_difference 23: note = Any nucleotide
  misc_difference 24: note = Any nucleotide
  modified_base 30: mod_base = OTHER; note = 2'-O-methyl adenosine
  modified_base 31: mod_base = OTHER; note = 2'-O-methyl guanosine
  modified_base 32: mod_base = OTHER; note = 2'-O-methyl cytidine
  modified_base 37: mod_base = OTHER; note = 2'-O-methyl guanosine
  modified_base 38: mod_base = OTHER; note = 2'-O-methyl adenosine
  modified_base 39: mod_base = OTHER; note = 2'-O-methyl adenosine
  modified_base 40: mod_base = OTHER; note = 2'-O-methyl adenosine
  modified_base 57: mod_base = OTHER; note = 2'-O-methyl cytidine
  modified_base 58: mod_base = OTHER; note = 2'-O-methyl cytidine
  modified_base 60: mod_base = OTHER; note = 2'-O-methyl uridine
  modified_base 61: mod_base = OTHER; note = 2'-O-methyl cytidine
  modified_base 62: mod_base = OTHER; note = 2'-O-methyl uridine
  modified_base 63: mod_base = OTHER; note = 2'-O-methyl guanosine
  modified_base 64: mod_base = OTHER; note = 2'-O-methyl adenosine
  modified_base 65: mod_base = OTHER; note = 2'-O-methyl adenosine
  modified_base 66: mod_base = OTHER; note = 2'-O-methyl adenosine
  modified_base 67: mod_base = OTHER; note = 2'-O-methyl adenosine
  modified_base 68: mod_base = OTHER; note = 2'-O-methyl guanosine
  modified_base 83: mod_base = OTHER; note = 2'-O-methyl uridine
  modified_base 84: mod_base = OTHER; note = 2'-O-methyl cytidine
  modified_base 85: mod_base = OTHER; note = 2'-O-methyl uridine
  modified_base 86: mod_base = OTHER; note = 2'-O-methyl guanosine
  modified_base 89: mod_base = OTHER; note = 2'-O-methyl uridine
  modified_base 90: mod_base = OTHER; note = 2'-O-methyl uridine
  modified_base 91: mod_base = OTHER; note = 2'-O-methyl cytidine
  modified_base 92: mod_base = OTHER; note = 2'-O-methyl uridine
  modified_base 98: mod_base = OTHER; note = 2'-O-methyl cytidine
  modified_base 99: mod_base = OTHER; note = 2'-O-methyl guanosine
  modified_base 100: mod_base = OTHER; note = 2'-O-methyl uridine phosphorothioate
  modified_base 101: mod_base = OTHER; note = 2'-O-methyl uridine phosphorothioate
  modified_base 102: mod_base = OTHER; note = 2'-O-methyl uridine phosphorothioate
  modified_base 103: mod_base = OTHER; note = 2'-O-methyl adenosine

SEQ ID NO: 110 - RNA, 103 nt, synthetic construct; identical to SEQ ID NO: 108
  source 1..103: mol_type = other RNA
  misc_difference 1: note = Any 2'-O-methyl nucleotide with a 3' phosphorothioate attached
  misc_difference 2: note = Any 2'-O-methyl nucleotide with a 3' phosphorothioate attached
  misc_difference 3: note = Any 2'-O-methyl nucleotide with a 3' phosphorothioate attached
  misc_difference 4: note = Any 2'-O-methyl nucleotide
  misc_difference 5: note = Any 2'-O-methyl nucleotide
  misc_difference 6: note = Any nucleotide
  misc_difference 7: note = Any nucleotide
  misc_difference 8: note = Any nucleotide
  misc_difference 9: note = Any 2'-O-methyl nucleotide
  misc_difference 10: note = Any 2'-O-methyl nucleotide
  misc_difference 11: note = Any 2'-O-methyl nucleotide
  misc_difference 12: note = Any nucleotide
  misc_difference 13: note = Any 2'-O-methyl nucleotide
  misc_difference 14: note = Any nucleotide
  misc_difference 15: note = Any nucleotide
  misc_difference 16: note = Any nucleotide
  misc_difference 17: note = Any nucleotide
  misc_difference 18: note = Any 2'-O-methyl nucleotide
  misc_difference 19: note = Any nucleotide
  misc_difference 20: note = Any nucleotide
  misc_difference 21: note = Any nucleotide
  misc_difference 22: note = Any 2'-O-methyl nucleotide
  misc_difference 23: note = Any nucleotide
  misc_difference 24: note = Any nucleotide
  modified_base 25: mod_base = OTHER; note = 2'-O-methyl guanosine
  modified_base 29: mod_base = OTHER; note = 2'-O-methyl uridine
  modified_base 30: mod_base = OTHER; note = 2'-O-methyl adenosine
  modified_base 31: mod_base = OTHER; note = 2'-O-methyl guanosine
  modified_base 32: mod_base = OTHER; note = 2'-O-methyl cytidine
  modified_base 37: mod_base = OTHER; note = 2'-O-methyl guanosine
  modified_base 38: mod_base = OTHER; note = 2'-O-methyl adenosine
  modified_base 39: mod_base = OTHER; note = 2'-O-methyl adenosine
  modified_base 40: mod_base = OTHER; note = 2'-O-methyl adenosine
  modified_base 41: mod_base = OTHER; note = 2'-O-methyl cytidine
  modified_base 43: mod_base = OTHER; note = 2'-O-methyl uridine
  modified_base 45: mod_base = OTHER; note = 2'-O-methyl guanosine
  modified_base 46: mod_base = OTHER; note = 2'-O-methyl cytidine
  modified_base 48: mod_base = OTHER; note = 2'-O-methyl adenosine
  modified_base 49: mod_base = OTHER; note = 2'-O-methyl cytidine
  modified_base 54: mod_base = OTHER; note = 2'-O-methyl adenosine
  modified_base 56: mod_base = OTHER; note = 2'-O-methyl guanosine
  modified_base 57: mod_base = OTHER; note = 2'-O-methyl cytidine
  modified_base 58: mod_base = OTHER; note = 2'-O-methyl cytidine
  modified_base 59: mod_base = OTHER; note = 2'-O-methyl guanosine
  modified_base 60: mod_base = OTHER; note = 2'-O-methyl uridine
  modified_base 61: mod_base = OTHER; note = 2'-O-methyl cytidine
  modified_base 62: mod_base = OTHER; note = 2'-O-methyl uridine
  modified_base 63: mod_base = OTHER; note = 2'-O-methyl guanosine
  modified_base 64: mod_base = OTHER; note = 2'-O-methyl adenosine
  modified_base 65: mod_base = OTHER; note = 2'-O-methyl adenosine
  modified_base 66: mod_base = OTHER; note = 2'-O-methyl adenosine
  modified_base 67: mod_base = OTHER; note = 2'-O-methyl adenosine
  modified_base 68: mod_base = OTHER; note = 2'-O-methyl guanosine
  modified_base 69: mod_base = OTHER; note = 2'-O-methyl adenosine
  modified_base 70: mod_base = OTHER; note = 2'-O-methyl uridine
  modified_base 72: mod_base = OTHER; note = 2'-O-methyl uridine
  modified_base 73: mod_base = OTHER; note = 2'-O-methyl guanosine
  modified_base 74: mod_base = OTHER; note = 2'-O-methyl cytidine
  modified_base 75: mod_base = OTHER; note = 2'-O-methyl cytidine
  modified_base 76: mod_base = OTHER; note = 2'-O-methyl guanosine
  modified_base 77: mod_base = OTHER; note = 2'-O-methyl cytidine
  modified_base 78: mod_base = OTHER; note = 2'-O-methyl adenosine
  modified_base 79: mod_base = OTHER; note = 2'-O-methyl adenosine
  modified_base 80: mod_base = OTHER; note = 2'-O-methyl cytidine
  modified_base 81: mod_base = OTHER; note = 2'-O-methyl guanosine
  modified_base 82: mod_base = OTHER; note = 2'-O-methyl cytidine
  modified_base 83: mod_base = OTHER; note = 2'-O-methyl uridine
  modified_base 84: mod_base = OTHER; note = 2'-O-methyl cytidine
  modified_base 85: mod_base = OTHER; note = 2'-O-methyl uridine
  modified_base 86: mod_base = OTHER; note = 2'-O-methyl guanosine
  modified_base 87: mod_base = OTHER; note = 2'-O-methyl cytidine
  modified_base 88: mod_base = OTHER; note = 2'-O-methyl cytidine
  modified_base 89: mod_base = OTHER; note = 2'-O-methyl uridine
  modified_base 90: mod_base = OTHER; note = 2'-O-methyl uridine
  modified_base 91: mod_base = OTHER; note = 2'-O-methyl cytidine
  modified_base 92: mod_base = OTHER; note = 2'-O-methyl uridine
  modified_base 94: mod_base = OTHER; note = 2'-O-methyl guanosine
  modified_base 96: mod_base = OTHER; note = 2'-O-methyl adenosine
  modified_base 97: mod_base = OTHER; note = 2'-O-methyl uridine
  modified_base 98: mod_base = OTHER; note = 2'-O-methyl cytidine
  modified_base 99: mod_base = OTHER; note = 2'-O-methyl guanosine
  modified_base 100: mod_base = OTHER; note = 2'-O-methyl uridine phosphorothioate
  modified_base 101: mod_base = OTHER; note = 2'-O-methyl uridine phosphorothioate
  modified_base 102: mod_base = OTHER; note = 2'-O-methyl uridine phosphorothioate
  modified_base 103: mod_base = OTHER; note = 2'-O-methyl adenosine

SEQ ID NO: 111 - RNA, 103 nt, synthetic construct; identical to SEQ ID NO: 108
  source 1..103: mol_type = other RNA
  misc_difference 1: note = Any 2'-O-methyl nucleotide with a 3' phosphorothioate attached
  misc_difference 2: note = Any 2'-O-methyl nucleotide with a 3' phosphorothioate attached
  misc_difference 3: note = Any 2'-O-methyl nucleotide with a 3' phosphorothioate attached
  misc_difference 4: note = Any 2'-O-methyl nucleotide
  misc_difference 5: note = Any 2'-O-methyl nucleotide
  misc_difference 6: note = Any nucleotide
  misc_difference 7: note = Any nucleotide
  misc_difference 8: note = Any nucleotide
  misc_difference 9: note = Any 2'-O-methyl nucleotide
  misc_difference 10: note = Any 2'-O-methyl nucleotide
  misc_difference 11: note = Any 2'-O-methyl nucleotide
  misc_difference 12: note = Any nucleotide
  misc_difference 13: note = Any 2'-O-methyl nucleotide
  misc_difference 14: note = Any nucleotide
  misc_difference 15: note = Any nucleotide
  misc_difference 16: note = Any 2'-O-methyl nucleotide
  misc_difference 17: note = Any nucleotide
  misc_difference 18: note = Any 2'-O-methyl nucleotide
  misc_difference 19: note = Any nucleotide
  misc_difference 20: note = Any nucleotide
  misc_difference 21: note = Any nucleotide
  misc_difference 22: note = Any 2'-O-methyl nucleotide
  misc_difference 23: note = Any nucleotide
  misc_difference 24: note = Any nucleotide
  modified_base 25: mod_base = OTHER; note = 2'-O-methyl guanosine
  modified_base 29: mod_base = OTHER; note = 2'-O-methyl uridine
  modified_base 30: mod_base = OTHER; note = 2'-O-methyl adenosine
  modified_base 31: mod_base = OTHER; note = 2'-O-methyl guanosine
  modified_base 32: mod_base = OTHER; note = 2'-O-methyl cytidine
  modified_base 37: mod_base = OTHER; note = 2'-O-methyl guanosine
  modified_base 38: mod_base = OTHER; note = 2'-O-methyl adenosine
  modified_base 39: mod_base = OTHER; note = 2'-O-methyl adenosine
  modified_base 40: mod_base = OTHER; note = 2'-O-methyl adenosine
  modified_base 41: mod_base = OTHER; note = 2'-O-methyl cytidine
  modified_base 43: mod_base = OTHER; note = 2'-O-methyl uridine
  modified_base 45: mod_base = OTHER; note = 2'-O-methyl guanosine
  modified_base 46: mod_base = OTHER; note = 2'-O-methyl cytidine
  modified_base 48: mod_base = OTHER; note = 2'-O-methyl adenosine
  modified_base 49: mod_base = OTHER; note = 2'-O-methyl cytidine
  modified_base 54: mod_base = OTHER; note = 2'-O-methyl adenosine
  modified_base 56: mod_base = OTHER; note = 2'-O-methyl guanosine
  modified_base 57: mod_base = OTHER; note = 2'-fluoro cytidine
  modified_base 58: mod_base = OTHER; note = 2'-O-methyl cytidine
  modified_base 59: mod_base = OTHER; note = 2'-fluoro guanosine
  modified_base 60: mod_base = OTHER; note = 2'-O-methyl uridine
  modified_base 61: mod_base = OTHER; note = 2'-fluoro cytidine
  modified_base 62: mod_base = OTHER; note = 2'-O-methyl uridine
  modified_base 63: mod_base = OTHER; note = 2'-fluoro guanosine
  modified_base 64: mod_base = OTHER; note = 2'-O-methyl adenosine
  modified_base 65: mod_base = OTHER; note = 2'-fluoro adenosine
  modified_base 66: mod_base = OTHER; note = 2'-O-methyl adenosine
  modified_base 67: mod_base = OTHER; note = 2'-fluoro adenosine
  modified_base 68: mod_base = OTHER; note = 2'-O-methyl guanosine
  modified_base 69: mod_base = OTHER; note = 2'-fluoro adenosine
  modified_base 70: mod_base = OTHER; note = 2'-O-methyl uridine
  modified_base 72: mod_base = OTHER; note = 2'-O-methyl uridine
  modified_base 73: mod_base = OTHER; note = 2'-fluoro guanosine
  modified_base 74: mod_base = OTHER; note = 2'-O-methyl cytidine
  modified_base 75: mod_base = OTHER; note = 2'-fluoro cytidine
  modified_base 76: mod_base = OTHER; note = 2'-O-methyl guanosine
  modified_base 77: mod_base = OTHER; note = 2'-fluoro cytidine
  modified_base 78: mod_base = OTHER; note = 2'-O-methyl adenosine
  modified_base 79: mod_base = OTHER; note = 2'-fluoro adenosine
  modified_base 80: mod_base = OTHER; note = 2'-O-methyl cytidine
  modified_base 81: mod_base = OTHER; note = 2'-fluoro guanosine
  modified_base 82: mod_base = OTHER; note = 2'-O-methyl cytidine
  modified_base 83: mod_base = OTHER; note = 2'-fluoro uridine
  modified_base 84: mod_base = OTHER; note = 2'-O-methyl cytidine
  modified_base 85: mod_base = OTHER; note = 2'-fluoro uridine
  modified_base 86: mod_base = OTHER; note = 2'-O-methyl guanosine
  modified_base 87: mod_base = OTHER; note = 2'-fluoro cytidine
  modified_base 88: mod_base = OTHER; note = 2'-O-methyl cytidine
  modified_base 89: mod_base = OTHER; note = 2'-fluoro uridine
  modified_base 90: mod_base = OTHER; note = 2'-O-methyl uridine
  modified_base 91: mod_base = OTHER; note = 2'-fluoro cytidine
  modified_base 92: mod_base = OTHER; note = 2'-O-methyl uridine
  modified_base 94: mod_base = OTHER; note = 2'-O-methyl guanosine
  modified_base 96: mod_base = OTHER; note = 2'-O-methyl adenosine
  modified_base 97: mod_base = OTHER; note = 2'-fluoro uridine
  modified_base 98: mod_base = OTHER; note = 2'-O-methyl cytidine
  modified_base 99: mod_base = OTHER; note = 2'-fluoro guanosine
  modified_base 100: mod_base = OTHER; note = 2'-O-methyl uridine phosphorothioate
  modified_base 101: mod_base = OTHER; note = 2'-O-methyl uridine phosphorothioate
  modified_base 102: mod_base = OTHER; note = 2'-O-methyl uridine phosphorothioate
  modified_base 103: mod_base = OTHER; note = 2'-O-methyl adenosine

SEQ ID NO: 112 - RNA, 103 nt, synthetic construct; identical to SEQ ID NO: 108
  source 1..103: mol_type = other RNA
  misc_difference 1: note = Any 2'-O-methyl nucleotide with a 3' phosphorothioate attached
  misc_difference 2: note = Any 2'-O-methyl nucleotide with a 3' phosphorothioate attached
  misc_difference 3: note = Any 2'-O-methyl nucleotide with a 3' phosphorothioate attached
  misc_difference 4: note = Any 2'-O-methyl nucleotide
  misc_difference 5: note = Any 2'-O-methyl nucleotide
  misc_difference 6: note = Any nucleotide
  misc_difference 7: note = Any nucleotide
  misc_difference 8: note = Any nucleotide
  misc_difference 9: note = Any 2'-O-methyl nucleotide
  misc_difference 10: note = Any 2'-O-methyl nucleotide
  misc_difference 11: note = Any 2'-O-methyl nucleotide
  misc_difference 12: note = Any nucleotide
  misc_difference 13: note = Any 2'-O-methyl nucleotide
  misc_difference 14: note = Any nucleotide
  misc_difference 15: note = Any nucleotide
  misc_difference 16: note = Any nucleotide
  misc_difference 17: note = Any nucleotide
  misc_difference 18: note = Any 2'-O-methyl nucleotide
  misc_difference 19: note = Any nucleotide
  misc_difference 20: note = Any nucleotide
  misc_difference 21: note = Any nucleotide
  misc_difference 22: note = Any 2'-O-methyl nucleotide
  misc_difference 23: note = Any nucleotide
  misc_difference 24: note = Any nucleotide
  modified_base 25: mod_base = OTHER; note = 2'-O-methyl guanosine
  modified_base 29: mod_base = OTHER; note = 2'-O-methyl uridine
  modified_base 30: mod_base = OTHER; note = 2'-O-methyl adenosine
  modified_base 31: mod_base = OTHER; note = 2'-O-methyl guanosine
  modified_base 32: mod_base = OTHER; note = 2'-O-methyl cytidine
  modified_base 37: mod_base = OTHER; note = 2'-O-methyl guanosine
  modified_base 38: mod_base = OTHER; note = 2'-O-methyl adenosine
  modified_base 39: mod_base = OTHER; note = 2'-O-methyl adenosine
  modified_base 40: mod_base = OTHER; note = 2'-O-methyl adenosine
  modified_base 57: mod_base = OTHER; note = 2'-O-methyl cytidine
  modified_base 58: mod_base = OTHER; note = 2'-O-methyl cytidine
  modified_base 60: mod_base = OTHER; note = 2'-O-methyl uridine
  modified_base 61: mod_base = OTHER; note = 2'-O-methyl cytidine
  modified_base 62: mod_base = OTHER; note = 2'-O-methyl uridine
  modified_base 63: mod_base = OTHER; note = 2'-O-methyl guanosine
  modified_base 64: mod_base = OTHER; note = 2'-O-methyl adenosine
  modified_base 65: mod_base = OTHER; note = 2'-O-methyl adenosine
  modified_base 66: mod_base = OTHER; note = 2'-O-methyl adenosine
  modified_base 67: mod_base = OTHER; note = 2'-O-methyl adenosine
  modified_base 68: mod_base = OTHER; note = 2'-O-methyl guanosine
  modified_base 83: mod_base = OTHER; note = 2'-O-methyl uridine
  modified_base 84: mod_base = OTHER; note = 2'-O-methyl cytidine
  modified_base 85: mod_base = OTHER; note = 2'-O-methyl uridine
  modified_base 86: mod_base = OTHER; note = 2'-O-methyl guanosine
  modified_base 89: mod_base = OTHER; note = 2'-O-methyl uridine
  modified_base 90: mod_base = OTHER; note = 2'-O-methyl uridine
  modified_base 91: mod_base = OTHER; note = 2'-O-methyl cytidine
  modified_base 92: mod_base = OTHER; note = 2'-O-methyl uridine
  modified_base 98: mod_base = OTHER; note = 2'-O-methyl cytidine
  modified_base 99: mod_base = OTHER; note = 2'-O-methyl guanosine
  modified_base 100: mod_base = OTHER; note = 2'-O-methyl uridine phosphorothioate
  modified_base 101: mod_base = OTHER; note = 2'-O-methyl uridine phosphorothioate
  modified_base 102: mod_base = OTHER; note = 2'-O-methyl uridine phosphorothioate
  modified_base 103: mod_base = OTHER; note = 2'-O-methyl adenosine

SEQ ID NO: 113 - RNA, 103 nt, synthetic construct; identical to SEQ ID NO: 108
  source 1..103: mol_type = other RNA
  misc_difference 1: note = Any 2'-O-methyl nucleotide with a 3' phosphorothioate attached
  misc_difference 2: note = Any 2'-O-methyl nucleotide with a 3' phosphorothioate attached
  misc_difference 3: note = Any 2'-O-methyl nucleotide with a 3' phosphorothioate attached
  misc_difference 4: note = Any nucleotide
  misc_difference 5: note = Any 2'-O-methyl nucleotide
  misc_difference 6: note = Any nucleotide
  misc_difference 7: note = Any nucleotide
  misc_difference 8: note = Any nucleotide
  misc_difference 9: note = Any 2'-O-methyl nucleotide
  misc_difference 10: note = Any 2'-O-methyl nucleotide
  misc_difference 11: note = Any nucleotide
  misc_difference 12: note = Any nucleotide
  misc_difference 13: note = Any 2'-O-methyl nucleotide
  misc_difference 14: note = Any nucleotide
  misc_difference 15: note = Any nucleotide
  misc_difference 16: note = Any nucleotide
  misc_difference 17: note = Any nucleotide
  misc_difference 18: note = Any 2'-O-methyl nucleotide
  misc_difference 19: note = Any nucleotide
  misc_difference 20: note = Any nucleotide
  misc_difference 21: note = Any nucleotide
  misc_difference 22: note = Any 2'-O-methyl nucleotide
  misc_difference 23: note = Any nucleotide
  misc_difference 24: note = Any nucleotide
  modified_base 25: mod_base = OTHER; note = 2'-O-methyl guanosine
  modified_base 30: mod_base = OTHER; note = 2'-O-methyl adenosine
  modified_base 31: mod_base = OTHER; note = 2'-O-methyl guanosine
  modified_base 32: mod_base = OTHER; note = 2'-O-methyl cytidine
  modified_base 37: mod_base = OTHER; note = 2'-O-methyl guanosine
  modified_base 38: mod_base = OTHER; note = 2'-O-methyl adenosine
  modified_base 39: mod_base = OTHER; note = 2'-O-methyl adenosine
  modified_base 40: mod_base = OTHER; note = 2'-O-methyl adenosine
  modified_base 57: mod_base = OTHER; note = 2'-O-methyl cytidine
  modified_base 58: mod_base = OTHER; note = 2'-O-methyl cytidine
  modified_base 60: mod_base = OTHER; note = 2'-O-methyl uridine
  modified_base 61: mod_base = OTHER; note = 2'-O-methyl cytidine
  modified_base 62: mod_base = OTHER; note = 2'-O-methyl uridine
  modified_base 63: mod_base = OTHER; note = 2'-O-methyl guanosine
  modified_base 64: mod_base = OTHER; note = 2'-O-methyl adenosine
  modified_base 65: mod_base = OTHER; note = 2'-O-methyl adenosine
  modified_base 66: mod_base = OTHER; note = 2'-O-methyl adenosine
  modified_base 67: mod_base = OTHER; note = 2'-O-methyl adenosine
  modified_base 68: mod_base = OTHER; note = 2'-O-methyl guanosine
  modified_base 83: mod_base = OTHER; note = 2'-O-methyl uridine
  modified_base 84: mod_base = OTHER; note = 2'-O-methyl cytidine
  modified_base 85: mod_base = OTHER; note = 2'-O-methyl uridine
  modified_base 86: mod_base = OTHER; note = 2'-O-methyl guanosine
  modified_base 89: mod_base = OTHER; note = 2'-O-methyl uridine
  modified_base 90: mod_base = OTHER; note = 2'-O-methyl uridine
  modified_base 91: mod_base = OTHER; note = 2'-O-methyl cytidine
  modified_base 92: mod_base = OTHER; note = 2'-O-methyl uridine
  modified_base 98: mod_base = OTHER; note = 2'-O-methyl cytidine
  modified_base 99: mod_base = OTHER; note = 2'-O-methyl guanosine
  modified_base 100: mod_base = OTHER; note = 2'-O-methyl uridine phosphorothioate
  modified_base 101: mod_base = OTHER; note = 2'-O-methyl uridine phosphorothioate
  modified_base 102: mod_base = OTHER; note = 2'-O-methyl uridine phosphorothioate
  modified_base 103: mod_base = OTHER; note = 2'-O-methyl adenosine

SEQ ID NO: 114 - RNA, 103 nt, synthetic construct; identical to SEQ ID NO: 108
  source 1..103: mol_type = other RNA
  misc_difference 1: note = Any 2'-O-methyl nucleotide with a 3' phosphorothioate attached
  misc_difference 2: note = Any 2'-O-methyl nucleotide with a 3' phosphorothioate attached
  misc_difference 3: note = Any 2'-O-methyl nucleotide with a 3' phosphorothioate attached
  misc_difference 4: note = Any nucleotide
  misc_difference 5: note = Any nucleotide
  misc_difference 6: note = Any nucleotide
  misc_difference 7: note = Any nucleotide
  misc_difference 8: note = Any nucleotide
  misc_difference 9: note = Any nucleotide
  misc_difference 10: note = Any nucleotide
  misc_difference 11: note = Any nucleotide
  misc_difference 12: note = Any nucleotide
  misc_difference 13: note = Any nucleotide
  misc_difference 14: note = Any nucleotide
  misc_difference 15: note = Any nucleotide
  misc_difference 16: note = Any nucleotide
  misc_difference 17: note = Any nucleotide
  misc_difference 18: note = Any 2'-O-methyl nucleotide
  misc_difference 19: note = Any nucleotide
  misc_difference 20: note = Any nucleotide
  misc_difference 21: note = Any nucleotide
  misc_difference 22: note = Any 2'-O-methyl nucleotide
  misc_difference 23: note = Any nucleotide
  misc_difference 24: note = Any nucleotide
  modified_base 30: mod_base = OTHER; note = 2'-O-methyl adenosine
  modified_base 31: mod_base = OTHER; note = 2'-O-methyl guanosine
  modified_base 32: mod_base = OTHER; note = 2'-O-methyl cytidine
  modified_base 37: mod_base = OTHER; note = 2'-O-methyl guanosine
  modified_base 38: mod_base = OTHER; note = 2'-O-methyl adenosine
  modified_base 39: mod_base = OTHER; note = 2'-O-methyl adenosine
  modified_base 40: mod_base = OTHER; note = 2'-O-methyl adenosine
  modified_base 57: mod_base = OTHER; note = 2'-O-methyl cytidine
  modified_base 58: mod_base = OTHER; note = 2'-O-methyl cytidine
  modified_base 60: mod_base = OTHER; note = 2'-O-methyl uridine
  modified_base 61: mod_base = OTHER; note = 2'-O-methyl cytidine
  modified_base 62: mod_base = OTHER; note = 2'-O-methyl uridine
  modified_base 63: mod_base = OTHER; note = 2'-O-methyl guanosine
  modified_base 64: mod_base = OTHER; note = 2'-O-methyl adenosine
  modified_base 65: mod_base = OTHER; note = 2'-O-methyl adenosine
  modified_base 66: mod_base = OTHER; note = 2'-O-methyl adenosine
  modified_base 67: mod_base = OTHER; note = 2'-O-methyl adenosine
  modified_base 68: mod_base = OTHER; note = 2'-O-methyl guanosine
  modified_base 83: mod_base = OTHER; note = 2'-O-methyl uridine
  modified_base 84: mod_base = OTHER; note = 2'-O-methyl cytidine
  modified_base 85: mod_base = OTHER; note = 2'-O-methyl uridine
  modified_base 86: mod_base = OTHER; note = 2'-O-methyl guanosine
  modified_base 89: mod_base = OTHER; note = 2'-O-methyl uridine
  modified_base 90: mod_base = OTHER; note = 2'-O-methyl uridine
  modified_base 91: mod_base = OTHER; note = 2'-O-methyl cytidine
  modified_base 92: mod_base = OTHER; note = 2'-O-methyl uridine
  modified_base 98: mod_base = OTHER; note = 2'-O-methyl cytidine
  modified_base 99: mod_base = OTHER; note = 2'-O-methyl guanosine
  modified_base 100: mod_base = OTHER; note = 2'-O-methyl uridine phosphorothioate
  modified_base 101: mod_base = OTHER; note = 2'-O-methyl uridine phosphorothioate
  modified_base 102: mod_base = OTHER; note = 2'-O-methyl uridine phosphorothioate
  modified_base 103: mod_base = OTHER; note = 2'-O-methyl adenosine

SEQ ID NO: 115 - RNA, 103 nt, synthetic construct; identical to SEQ ID NO: 108
  source 1..103: mol_type = other RNA
  misc_difference 1: note = Any 2'-O-methyl nucleotide with a 3' phosphorothioate attached
  misc_difference 2: note = Any 2'-O-methyl nucleotide with a 3' phosphorothioate attached
  misc_difference 3: note = Any 2'-O-methyl nucleotide with a 3' phosphorothioate attached
  misc_difference 4: note = Any 2'-O-methyl nucleotide
  misc_difference 5: note = Any 2'-O-methyl nucleotide
  misc_difference 6: note = Any 2'-O-methyl nucleotide
  misc_difference 7: note = Any 2'-O-methyl nucleotide
  misc_difference 8: note = Any 2'-O-methyl nucleotide
  misc_difference 9: note = Any 2'-O-methyl nucleotide
  misc_difference 10: note = Any 2'-O-methyl nucleotide
  misc_difference 11: note = Any 2'-O-methyl nucleotide
  misc_difference 12: note = Any 2'-O-methyl nucleotide
  misc_difference 13: note = Any 2'-O-methyl nucleotide
  misc_difference 14: note = Any 2'-O-methyl nucleotide
  misc_difference 15: note = Any nucleotide
  misc_difference 16: note = Any nucleotide
  misc_difference 17: note = Any nucleotide
  misc_difference 18: note = Any nucleotide
  misc_difference 19: note = Any nucleotide
  misc_difference 20: note = Any nucleotide
  misc_difference 21: note = Any nucleotide
  misc_difference 22: note = Any nucleotide
  misc_difference 23: note = Any nucleotide
  misc_difference 24: note = Any nucleotide
  modified_base 30: mod_base = OTHER; note = 2'-O-methyl adenosine
  modified_base 31: mod_base = OTHER; note = 2'-O-methyl guanosine
  modified_base 32: mod_base = OTHER; note = 2'-O-methyl cytidine
  modified_base 37: mod_base = OTHER; note = 2'-O-methyl guanosine
  modified_base 38: mod_base = OTHER; note = 2'-O-methyl adenosine
  modified_base 39: mod_base = OTHER; note = 2'-O-methyl adenosine
  modified_base 40: mod_base = OTHER; note = 2'-O-methyl adenosine
  modified_base 57: mod_base = OTHER; note = 2'-O-methyl cytidine
  modified_base 58: mod_base = OTHER; note = 2'-O-methyl cytidine
  modified_base 60: mod_base = OTHER; note = 2'-O-methyl uridine
  modified_base 61: mod_base = OTHER; note = 2'-O-methyl cytidine
  modified_base 62: mod_base = OTHER; note = 2'-O-methyl uridine
  modified_base 63: mod_base = OTHER; note = 2'-O-methyl guanosine
  modified_base 64: mod_base = OTHER; note = 2'-O-methyl adenosine
  modified_base 65: mod_base = OTHER; note = 2'-O-methyl adenosine
  modified_base 66: mod_base = OTHER; note = 2'-O-methyl adenosine
  modified_base 67: mod_base = OTHER; note = 2'-O-methyl adenosine
  modified_base 68: mod_base = OTHER; note = 2'-O-methyl guanosine
  modified_base 83: mod_base = OTHER; note = 2'-O-methyl uridine
  modified_base 84: mod_base = OTHER; note = 2'-O-methyl cytidine
  modified_base 85: mod_base = OTHER; note = 2'-O-methyl uridine
  modified_base 86: mod_base = OTHER; note = 2'-O-methyl guanosine
  modified_base 89: mod_base = OTHER; note = 2'-O-methyl uridine
  modified_base 90: mod_base = OTHER; note = 2'-O-methyl uridine
  modified_base 91: mod_base = OTHER; note = 2'-O-methyl cytidine
  modified_base 92: mod_base = OTHER; note = 2'-O-methyl uridine
  modified_base 98: mod_base = OTHER; note = 2'-O-methyl cytidine
  modified_base 99: mod_base = OTHER; note = 2'-O-methyl guanosine
  modified_base 100: mod_base = OTHER; note = 2'-O-methyl uridine phosphorothioate
  modified_base 101: mod_base = OTHER; note = 2'-O-methyl uridine phosphorothioate
  modified_base 102: mod_base = OTHER; note = 2'-O-methyl uridine phosphorothioate
  modified_base 103: mod_base = OTHER; note = 2'-O-methyl adenosine

SEQ ID NO: 116 - RNA, 103 nt, synthetic construct; identical to SEQ ID NO: 108
  source 1..103: mol_type = other RNA
  misc_difference 1: note = Any 2'-O-methyl nucleotide with a 3' phosphorothioate attached
  misc_difference 2: note = Any 2'-O-methyl nucleotide with a 3' phosphorothioate attached
  misc_difference 3: note = Any 2'-O-methyl nucleotide with a 3' phosphorothioate attached
  misc_difference 4: note = Any 2'-O-methyl nucleotide
  misc_difference 5: note = Any 2'-O-methyl nucleotide
  misc_difference 6: note = Any 2'-O-methyl nucleotide
  misc_difference 7: note = Any 2'-O-methyl nucleotide
  misc_difference 8: note = Any 2'-O-methyl nucleotide
  misc_difference 9: note = Any 2'-O-methyl nucleotide
  misc_difference 10: note = Any 2'-O-methyl nucleotide
  misc_difference 11: note = Any 2'-O-methyl nucleotide
  misc_difference 12: note = Any 2'-O-methyl nucleotide
  misc_difference 13: note = Any 2'-O-methyl nucleotide
  misc_difference 14: note = Any 2'-O-methyl nucleotide
  misc_difference 15: note = Any nucleotide
  misc_difference 16: note = Any nucleotide
  misc_difference 17: note = Any nucleotide
  misc_difference 18: note = Any 2'-O-methyl nucleotide
  misc_difference 19: note = Any nucleotide
  misc_difference 20: note = Any nucleotide
  misc_difference 21: note = Any nucleotide
  misc_difference 22: note = Any 2'-O-methyl nucleotide
  misc_difference 23: note = Any nucleotide
  misc_difference 24: note = Any nucleotide
  modified_base 25: mod_base = OTHER; note = 2'-O-methyl guanosine
  modified_base 29: mod_base = OTHER; note = 2'-O-methyl uridine
  modified_base 30: mod_base = OTHER; note = 2'-O-methyl adenosine
  modified_base 31: mod_base = OTHER; note = 2'-O-methyl guanosine
  modified_base 32: mod_base = OTHER; note = 2'-O-methyl cytidine
  modified_base 37: mod_base = OTHER; note = 2'-O-methyl guanosine
  modified_base 38: mod_base = OTHER; note = 2'-O-methyl adenosine
  modified_base 39: mod_base = OTHER; note = 2'-O-methyl adenosine
  modified_base 40: mod_base = OTHER; note = 2'-O-methyl adenosine
  modified_base 57: mod_base = OTHER; note = 2'-O-methyl cytidine
  modified_base 58: mod_base = OTHER; note = 2'-O-methyl cytidine
  modified_base 60: mod_base = OTHER; note = 2'-O-methyl uridine
  modified_base 61: mod_base = OTHER; note = 2'-O-methyl cytidine
  modified_base 62: mod_base = OTHER; note = 2'-O-methyl uridine
  modified_base 63: mod_base = OTHER; note = 2'-O-methyl guanosine
  modified_base 64: mod_base = OTHER; note = 2'-O-methyl adenosine
  modified_base 65: mod_base = OTHER; note = 2'-O-methyl adenosine
  modified_base 66: mod_base = OTHER; note = 2'-O-methyl adenosine
  modified_base 67: mod_base = OTHER; note = 2'-O-methyl adenosine
  modified_base 68: mod_base = OTHER; note = 2'-O-methyl guanosine
  modified_base 83: mod_base = OTHER; note = 2'-O-methyl uridine
  modified_base 84: mod_base = OTHER; note = 2'-O-methyl cytidine
  modified_base 85: mod_base = OTHER; note = 2'-O-methyl uridine
  modified_base 86: mod_base = OTHER; note = 2'-O-methyl guanosine
  modified_base 89: mod_base = OTHER; note = 2'-O-methyl uridine
  modified_base 90: mod_base = OTHER; note = 2'-O-methyl uridine
  modified_base 91: mod_base = OTHER; note = 2'-O-methyl cytidine
  modified_base 92: mod_base = OTHER; note = 2'-O-methyl uridine
  modified_base 98: mod_base = OTHER; note = 2'-O-methyl cytidine
  modified_base 99: mod_base = OTHER; note = 2'-O-methyl guanosine
  modified_base 100: mod_base = OTHER; note = 2'-O-methyl uridine phosphorothioate
  modified_base 101: mod_base = OTHER; note = 2'-O-methyl uridine phosphorothioate
  modified_base 102: mod_base = OTHER; note = 2'-O-methyl uridine phosphorothioate
  modified_base 103: mod_base = OTHER; note = 2'-O-methyl adenosine

SEQ ID NO: 117 - RNA, 103 nt, synthetic construct; identical to SEQ ID NO: 108
  source 1..103: mol_type = other RNA
  misc_difference 1: note = Any 2'-O-methyl nucleotide with a 3' phosphorothioate attached
  misc_difference 2: note = Any 2'-O-methyl nucleotide with a 3' phosphorothioate attached
  misc_difference 3: note = Any 2'-O-methyl nucleotide with a 3' phosphorothioate attached
  misc_difference 4: note = Any 2'-O-methyl nucleotide
  misc_difference 5: note = Any 2'-O-methyl nucleotide
  misc_difference 6: note = Any nucleotide
  misc_difference 7: note = Any nucleotide
  misc_difference 8: note = Any nucleotide
  misc_difference 9: note = Any 2'-O-methyl nucleotide
  misc_difference 10: note = Any 2'-O-methyl nucleotide
  misc_difference 11: note = Any 2'-O-methyl nucleotide
  misc_difference 12: note = Any nucleotide
  misc_difference 13: note = Any 2'-O-methyl nucleotide
  misc_difference 14: note = Any nucleotide
  misc_difference 15: note = Any nucleotide
  misc_difference 16: note = Any nucleotide
  misc_difference 17: note = Any nucleotide
  misc_difference 18: note = Any 2'-O-methyl nucleotide
  misc_difference 19: note = Any nucleotide
  misc_difference 20: note = Any nucleotide
  misc_difference 21: note = Any nucleotide
  misc_difference 22: note = Any 2'-O-methyl nucleotide
  misc_difference 23: note = Any nucleotide
  misc_difference 24: note = Any nucleotide
  modified_base 25: mod_base = OTHER; note = 2'-O-methyl guanosine
  modified_base 29: mod_base = OTHER; note = 2'-O-methyl uridine
  modified_base 30: mod_base = OTHER; note = 2'-O-methyl adenosine
  modified_base 31: mod_base = OTHER; note = 2'-O-methyl guanosine
  modified_base 32: mod_base = OTHER; note = 2'-O-methyl cytidine
  modified_base 37: mod_base = OTHER; note = 2'-O-methyl guanosine
  modified_base 38: mod_base = OTHER; note = 2'-O-methyl adenosine
  modified_base 39: mod_base = OTHER; note = 2'-O-methyl adenosine
  modified_base 40: mod_base = OTHER; note = 2'-O-methyl adenosine
  modified_base 54: mod_base = OTHER; note = 2'-O-methyl adenosine
  modified_base 56: mod_base = OTHER; note = 2'-O-methyl guanosine
  modified_base 57: mod_base = OTHER; note = 2'-O-methyl cytidine
  modified_base 58: mod_base = OTHER; note = 2'-O-methyl cytidine
  modified_base 59: mod_base = OTHER; note = 2'-O-methyl guanosine
  modified_base 60: mod_base = OTHER; note = 2'-O-methyl uridine
  modified_base 61: mod_base = OTHER; note = 2'-O-methyl cytidine
  modified_base 62: mod_base = OTHER; note = 2'-O-methyl uridine
  modified_base 63: mod_base = OTHER; note = 2'-O-methyl guanosine
  modified_base 64: mod_base = OTHER; note = 2'-O-methyl adenosine
  modified_base 65: mod_base = OTHER; note = 2'-O-methyl adenosine
  modified_base 66: mod_base = OTHER; note = 2'-O-methyl adenosine
  modified_base 67: mod_base = OTHER; note = 2'-O-methyl adenosine
  modified_base 68: mod_base = OTHER; note = 2'-O-methyl guanosine
  modified_base 69: mod_base = OTHER; note = 2'-O-methyl adenosine
  modified_base 70: mod_base = OTHER; note = 2'-O-methyl uridine
  modified_base 73: mod_base = OTHER; note = 2'-O-methyl guanosine
  modified_base 74: mod_base = OTHER; note = 2'-O-methyl cytidine
  modified_base 75: mod_base = OTHER; note = 2'-O-methyl cytidine
  modified_base 83: mod_base = OTHER; note = 2'-O-methyl uridine
  modified_base 84: mod_base = OTHER; note = 2'-O-methyl cytidine
  modified_base 85: mod_base = OTHER; note = 2'-O-methyl uridine
  modified_base 86: mod_base = OTHER; note = 2'-O-methyl guanosine
  modified_base 89: mod_base = OTHER; note = 2'-O-methyl uridine
  modified_base 90: mod_base = OTHER; note = 2'-O-methyl uridine
  modified_base 91: mod_base = OTHER; note = 2'-O-methyl cytidine
  modified_base 92: mod_base = OTHER; note = 2'-O-methyl uridine
  modified_base 98: mod_base = OTHER; note = 2'-O-methyl cytidine
  modified_base 99: mod_base = OTHER; note = 2'-O-methyl guanosine
  modified_base 100: mod_base = OTHER; note = 2'-O-methyl uridine phosphorothioate
  modified_base 101: mod_base = OTHER; note = 2'-O-methyl uridine phosphorothioate
  modified_base 102: mod_base = OTHER; note = 2'-O-methyl uridine phosphorothioate
  modified_base 103: mod_base = OTHER; note = 2'-O-methyl adenosine

SEQ ID NO: 118 - RNA, 103 nt, synthetic construct; identical to SEQ ID NO: 108
  source 1..103: mol_type = other RNA
  misc_difference 1: note = Any 2'-O-methyl nucleotide with a 3' phosphorothioate attached
  misc_difference 2: note = Any 2'-O-methyl nucleotide with a 3' phosphorothioate attached
  misc_difference 3: note = Any 2'-O-methyl nucleotide with a 3' phosphorothioate attached
  misc_difference 4: note = Any 2'-O-methyl nucleotide
  misc_difference 5: note = Any 2'-O-methyl nucleotide
  misc_difference 6: note = Any nucleotide
  misc_difference 7: note = Any nucleotide
  misc_difference 8: note = Any nucleotide
  misc_difference 9: note = Any 2'-O-methyl nucleotide
  misc_difference 10: note = Any 2'-O-methyl nucleotide
  misc_difference 11: note = Any 2'-O-methyl nucleotide
  misc_difference 12: note = Any nucleotide
  misc_difference 13: note = Any 2'-O-methyl nucleotide
  misc_difference 14: note = Any nucleotide
  misc_difference 15: note = Any nucleotide
  misc_difference 16: note = Any nucleotide
  misc_difference 17: note = Any nucleotide
  misc_difference 18: note = Any 2'-O-methyl nucleotide
  misc_difference 19: note = Any nucleotide
  misc_difference 20: note = Any nucleotide
  misc_difference 21: note = Any nucleotide
  misc_difference 22: note = Any 2'-O-methyl nucleotide
  misc_difference 23: note = Any nucleotide
  misc_difference 24: note = Any nucleotide
  modified_base 25: mod_base = OTHER; note = 2'-O-methyl guanosine
  modified_base 29: mod_base = OTHER; note = 2'-O-methyl uridine
  modified_base 30: mod_base = OTHER; note = 2'-O-methyl adenosine
  modified_base 31: mod_base = OTHER; note = 2'-O-methyl guanosine
  modified_base 32: mod_base = OTHER; note = 2'-O-methyl cytidine
  modified_base 37: mod_base = OTHER; note = 2'-O-methyl guanosine
  modified_base 38: mod_base = OTHER; note = 2'-O-methyl adenosine
  modified_base 39: mod_base = OTHER; note = 2'-O-methyl adenosine
  modified_base 40: mod_base = OTHER; note = 2'-O-methyl adenosine
  modified_base 57: mod_base = OTHER; note = 2'-O-methyl cytidine
  modified_base 58: mod_base = OTHER; note = 2'-O-methyl cytidine
  modified_base 60: mod_base = OTHER; note = 2'-O-methyl uridine
  modified_base 61: mod_base = OTHER; note = 2'-O-methyl cytidine
  modified_base 62: mod_base = OTHER; note = 2'-O-methyl uridine
  modified_base 63: mod_base = OTHER; note = 2'-O-methyl guanosine
  modified_base 64: mod_base = OTHER; note = 2'-O-methyl adenosine
  modified_base 65: mod_base = OTHER; note = 2'-O-methyl adenosine
  modified_base 66: mod_base = OTHER; note = 2'-O-methyl adenosine
  modified_base 67: mod_base = OTHER; note = 2'-O-methyl adenosine
  modified_base 68: mod_base = OTHER; note = 2'-O-methyl guanosine
  modified_base 76: mod_base = OTHER; note = 2'-O-methyl guanosine
  modified_base 78: mod_base = OTHER; note = 2'-O-methyl adenosine
  modified_base 79: mod_base = OTHER; note = 2'-O-methyl adenosine
  modified_base 80: mod_base = OTHER; note = 2'-O-methyl cytidine
  modified_base 81: mod_base = OTHER; note = 2'-O-methyl guanosine
  modified_base 82: mod_base = OTHER; note = 2'-O-methyl cytidine
  modified_base 83: mod_base = OTHER; note = 2'-O-methyl uridine
  modified_base 84: mod_base = OTHER; note = 2'-O-methyl cytidine
  modified_base 85: mod_base = OTHER; note = 2'-O-methyl uridine
  modified_base 86: mod_base = OTHER; note = 2'-O-methyl guanosine
  modified_base 87: mod_base = OTHER; note = 2'-O-methyl cytidine
  modified_base 88: mod_base = OTHER; note = 2'-O-methyl cytidine
  modified_base 89: mod_base = OTHER; note = 2'-O-methyl uridine
  modified_base 90: mod_base = OTHER; note = 2'-O-methyl uridine
  modified_base 91: mod_base = OTHER; note = 2'-O-methyl cytidine
  modified_base 92: mod_base = OTHER; note = 2'-O-methyl uridine
  modified_base 94: mod_base = OTHER; note = 2'-O-methyl guanosine
  modified_base 96: mod_base = OTHER; note = 2'-O-methyl adenosine
  modified_base 98: mod_base = OTHER; note = 2'-O-methyl cytidine
  modified_base 99: mod_base = OTHER; note = 2'-O-methyl guanosine
  modified_base 100: mod_base = OTHER; note = 2'-O-methyl uridine phosphorothioate
  modified_base 101: mod_base = OTHER; note = 2'-O-methyl uridine phosphorothioate
  modified_base 102: mod_base = OTHER; note = 2'-O-methyl uridine phosphorothioate
  modified_base 103: mod_base = OTHER; note = 2'-O-methyl adenosine

SEQ ID NO: 119 - RNA, 103 nt, synthetic construct; identical to SEQ ID NO: 108
  source 1..103: mol_type = other RNA
  misc_difference 1: note = Any 2'-O-methyl nucleotide with a 3' phosphorothioate attached
  misc_difference 2: note = Any 2'-O-methyl nucleotide with a 3' phosphorothioate attached
  misc_difference 3: note = Any 2'-O-methyl nucleotide with a 3' phosphorothioate attached
  misc_difference 4: note = Any 2'-O-methyl nucleotide
  misc_difference 5: note = Any 2'-O-methyl nucleotide
  misc_difference 6: note = Any nucleotide
  misc_difference 7: note = Any nucleotide
  misc_difference 8: note = Any nucleotide
  misc_difference 9: note = Any 2'-O-methyl nucleotide
  misc_difference 10: note = Any 2'-O-methyl nucleotide
  misc_difference 11: note = Any 2'-O-methyl nucleotide
  misc_difference 12: note = Any nucleotide
  misc_difference 13: note = Any 2'-O-methyl nucleotide
  misc_difference 14: note = Any nucleotide
  misc_difference 15: note = Any nucleotide
  misc_difference 16: note = Any nucleotide
  misc_difference 17: note = Any nucleotide
  misc_difference 18: note = Any 2'-O-methyl nucleotide
  misc_difference 19: note = Any nucleotide
  misc_difference 20: note = Any nucleotide
  misc_difference 21: note = Any nucleotide
  misc_difference 22: note = Any 2'-O-methyl nucleotide
  misc_difference 23: note = Any nucleotide
  misc_difference 24: note = Any nucleotide
  modified_base 25: mod_base = OTHER; note = 2'-fluoro guanosine
  modified_base 29: mod_base = OTHER; note = 2'-fluoro uridine
  modified_base 30: mod_base = OTHER; note = 2'-fluoro adenosine
  modified_base 31: mod_base = OTHER; note = 2'-fluoro guanosine
  modified_base 32: mod_base = OTHER; note = 2'-fluoro cytidine
  modified_base 37: mod_base = OTHER; note = 2'-O-methyl guanosine
  modified_base 38: mod_base = OTHER; note = 2'-O-methyl adenosine
  modified_base 39: mod_base = OTHER; note = 2'-O-methyl adenosine
  modified_base 40: mod_base = OTHER; note = 2'-O-methyl adenosine
  modified_base 57: mod_base = OTHER; note = 2'-fluoro cytidine
  modified_base 58: mod_base = OTHER; note = 2'-fluoro cytidine
  modified_base 60: mod_base = OTHER; note = 2'-fluoro uridine
  modified_base 61: mod_base = OTHER; note = 2'-fluoro cytidine
  modified_base 62: mod_base = OTHER; note = 2'-fluoro uridine
  modified_base 63: mod_base = OTHER; note = 2'-O-methyl guanosine
  modified_base 64: mod_base = OTHER; note = 2'-O-methyl adenosine
  modified_base 65: mod_base = OTHER; note = 2'-O-methyl adenosine
  modified_base 66: mod_base = OTHER; note = 2'-O-methyl adenosine
  modified_base 67: mod_base = OTHER; note = 2'-fluoro adenosine
  modified_base 68: mod_base = OTHER; note = 2'-fluoro guanosine
  modified_base 83: mod_base = OTHER; note = 2'-O-methyl uridine
  modified_base 84: mod_base = OTHER; note = 2'-O-methyl cytidine
  modified_base 85: mod_base = OTHER; note = 2'-fluoro uridine
  modified_base 86: mod_base = OTHER; note = 2'-fluoro guanosine
  modified_base 89: mod_base = OTHER; note = 2'-O-methyl uridine
  modified_base 90: mod_base = OTHER; note = 2'-O-methyl uridine
  modified_base 91: mod_base = OTHER; note = 2'-O-methyl cytidine
  modified_base 92: mod_base = OTHER; note = 2'-O-methyl uridine
  modified_base 98: mod_base = OTHER; note = 2'-fluoro cytidine
  modified_base 99: mod_base = OTHER; note = 2'-fluoro guanosine
  modified_base 100: mod_base = OTHER; note = 2'-fluoro uridine phosphorothioate
  modified_base 101: mod_base = OTHER; note = 2'-fluoro uridine phosphorothioate
  modified_base 102: mod_base = OTHER; note = 2'-O-methyl uridine phosphorothioate
  modified_base 103: mod_base = OTHER; note = 2'-O-methyl adenosine

SEQ ID NO: 120 - RNA, 103 nt, synthetic construct; identical to SEQ ID NO: 108
  source 1..103: mol_type = other RNA
  misc_difference 1: note = Any 2'-O-methyl nucleotide with a 3' phosphorothioate attached
  misc_difference 2: note = Any 2'-O-methyl nucleotide with a 3' phosphorothioate attached
  misc_difference 3: note = Any 2'-O-methyl nucleotide with a 3' phosphorothioate attached
  misc_difference 4: note = Any 2'-O-methyl nucleotide
  misc_difference 5: note = Any 2'-O-methyl nucleotide
  misc_difference 6: note = Any nucleotide
  misc_difference 7: note = Any nucleotide
  misc_difference 8: note = Any nucleotide
  misc_difference 9: note = Any 2'-O-methyl nucleotide
  misc_difference 10: note = Any 2'-O-methyl nucleotide
  misc_difference 11: note = Any 2'-O-methyl nucleotide
  misc_difference 12: note = Any nucleotide
  misc_difference 13: note = Any 2'-O-methyl nucleotide
  misc_difference 14: note = Any nucleotide
  misc_difference 15: note = Any nucleotide
  misc_difference 16: note = Any nucleotide
  misc_difference 17: note = Any nucleotide
  misc_difference 18: note = Any 2'-O-methyl nucleotide
  misc_difference 19: note = Any nucleotide
  misc_difference 20: note = Any nucleotide
  misc_difference 21: note = Any nucleotide
  misc_difference 22: note = Any 2'-O-methyl nucleotide
  misc_difference 23: note = Any nucleotide
  misc_difference 24: note = Any nucleotide
  modified_base 25: mod_base = OTHER; note = 2'-fluoro guanosine
  modified_base 29: mod_base = OTHER; note = 2'-fluoro uridine
  modified_base 30: mod_base = OTHER; note = 2'-fluoro adenosine
  modified_base 31: mod_base = OTHER; note = 2'-fluoro guanosine
  modified_base 32: mod_base = OTHER; note = 2'-fluoro cytidine
  modified_base 37: mod_base = OTHER; note = 2'-O-methyl guanosine
  modified_base 38: mod_base = OTHER; note = 2'-O-methyl adenosine
  modified_base 39: mod_base = OTHER; note = 2'-O-methyl adenosine
  modified_base 40: mod_base = OTHER; note = 2'-O-methyl adenosine
  modified_base 41: mod_base = OTHER; note = 2'-O-methyl cytidine
  modified_base 43: mod_base = OTHER; note = 2'-O-methyl uridine
  modified_base 45: mod_base = OTHER; note = 2'-fluoro guanosine
  modified_base 46: mod_base = OTHER; note = 2'-fluoro cytidine
  modified_base 48: mod_base = OTHER; note = 2'-fluoro adenosine
  modified_base 49: mod_base = OTHER; note = 2'-fluoro cytidine
  modified_base 57: mod_base = OTHER; note = 2'-O-methyl cytidine
  modified_base 58: mod_base = OTHER; note = 2'-O-methyl cytidine
  modified_base 60: mod_base = OTHER; note = 2'-O-methyl uridine
  modified_base 61: mod_base = OTHER; note = 2'-O-methyl cytidine
  modified_base 62: mod_base = OTHER; note = 2'-O-methyl uridine
  modified_base 63: mod_base = OTHER; note = 2'-O-methyl guanosine
  modified_base 64: mod_base = OTHER; note = 2'-O-methyl adenosine
  modified_base 65: mod_base = OTHER; note = 2'-O-methyl adenosine
  modified_base 66: mod_base = OTHER; note = 2'-O-methyl adenosine
  modified_base 67: mod_base = OTHER; note = 2'-O-methyl adenosine
  modified_base 68: mod_base = OTHER; note = 2'-O-methyl guanosine
  modified_base 83: mod_base = OTHER; note = 2'-O-methyl uridine
  modified_base 84: mod_base = OTHER; note = 2'-O-methyl cytidine
  modified_base 85: mod_base = OTHER; note = 2'-O-methyl uridine
  modified_base 86: mod_base = OTHER; note = 2'-O-methyl guanosine
  modified_base 89: mod_base = OTHER; note = 2'-O-methyl uridine
  modified_base 90: mod_base = OTHER; note = 2'-O-methyl uridine
  modified_base 91: mod_base = OTHER; note = 2'-O-methyl cytidine
  modified_base 92: mod_base = OTHER; note = 2'-O-methyl uridine
  modified_base 98: mod_base = OTHER; note = 2'-O-methyl cytidine
  modified_base 99: mod_base = OTHER; note = 2'-O-methyl guanosine
  modified_base 100: mod_base = OTHER; note = 2'-O-methyl uridine phosphorothioate
  modified_base 101: mod_base = OTHER; note = 2'-O-methyl uridine phosphorothioate
  modified_base 102: mod_base = OTHER; note = 2'-O-methyl uridine phosphorothioate
  modified_base 103: mod_base = OTHER; note = 2'-O-methyl adenosine

SEQ ID NO: 121 - RNA, 103 nt, synthetic construct; identical to SEQ ID NO: 108
  source 1..103: mol_type = other RNA
  misc_difference 1: note = Any 2'-O-methyl nucleotide with a 3' phosphorothioate attached
  misc_difference 2: note = Any 2'-O-methyl nucleotide with a 3' phosphorothioate attached
  misc_difference 3: note = Any 2'-O-methyl nucleotide with a 3' phosphorothioate attached
  misc_difference 4: note = Any 2'-O-methyl nucleotide
  misc_difference 5: note = Any 2'-O-methyl nucleotide
  misc_difference 6: note = Any nucleotide
  misc_difference 7: note = Any nucleotide
  misc_difference 8: note = Any nucleotide
  misc_difference 9: note = Any 2'-O-methyl nucleotide
  misc_difference 10: note = Any 2'-O-methyl nucleotide
  misc_difference 11: note = Any 2'-O-methyl nucleotide
  misc_difference 12: note = Any nucleotide
  misc_difference 13: note = Any 2'-O-methyl nucleotide
  misc_difference 14: note = Any nucleotide
  misc_difference 15: note = Any nucleotide
  misc_difference 16: note = Any nucleotide
  misc_difference 17: note = Any nucleotide
  misc_difference 18: note = Any 2'-O-methyl nucleotide
  misc_difference 19: note = Any nucleotide
  misc_difference 20: note = Any nucleotide
  misc_difference 21: note = Any nucleotide
  misc_difference 22: note = Any 2'-O-methyl nucleotide
  misc_difference 23: note = Any nucleotide
  misc_difference 24: note = Any nucleotide
  modified_base 25: mod_base = OTHER; note = 2'-fluoro guanosine
  modified_base 29: mod_base = OTHER; note = 2'-fluoro uridine
  modified_base 30: mod_base = OTHER; note = 2'-fluoro adenosine
  modified_base 31: mod_base = OTHER; note = 2'-fluoro guanosine
  modified_base 32: mod_base = OTHER; note = 2'-fluoro cytidine
  modified_base 37: mod_base = OTHER; note = 2'-O-methyl guanosine
  modified_base 38: mod_base = OTHER; note = 2'-O-methyl adenosine
  modified_base 39: mod_base = OTHER; note = 2'-O-methyl adenosine
  modified_base 40: mod_base = OTHER; note = 2'-O-methyl adenosine
  modified_base 41: mod_base = OTHER; note = 2'-O-methyl cytidine
  modified_base 43: mod_base = OTHER; note = 2'-O-methyl uridine
  modified_base 45: mod_base = OTHER; note = 2'-fluoro guanosine
  modified_base 46: mod_base = OTHER; note = 2'-fluoro cytidine
  modified_base 48: mod_base = OTHER; note = 2'-fluoro adenosine
  modified_base 49: mod_base = OTHER; note = 2'-fluoro cytidine
  modified_base 57: mod_base = OTHER; note = 2'-fluoro cytidine
  modified_base 58: mod_base = OTHER; note = 2'-fluoro cytidine
  modified_base 60: mod_base = OTHER; note = 2'-fluoro uridine
  modified_base 61: mod_base = OTHER; note = 2'-fluoro cytidine
  modified_base 62: mod_base = OTHER; note = 2'-fluoro uridine
  modified_base 63: mod_base = OTHER; note = 2'-O-methyl guanosine
  modified_base 64: mod_base = OTHER; note = 2'-O-methyl adenosine
  modified_base 65: mod_base = OTHER; note = 2'-O-methyl adenosine
  modified_base 66: mod_base = OTHER; note = 2'-O-methyl adenosine
  modified_base 67: mod_base = OTHER; note = 2'-fluoro adenosine
  modified_base 68: mod_base = OTHER; note = 2'-fluoro guanosine
  modified_base 83: mod_base = OTHER; note = 2'-O-methyl uridine
  modified_base 84: mod_base = OTHER; note = 2'-O-methyl cytidine
  modified_base 85: mod_base = OTHER; note = 2'-fluoro uridine
  modified_base 86: mod_base = OTHER; note = 2'-fluoro guanosine
  modified_base 89: mod_base = OTHER; note = 2'-O-methyl uridine
  modified_base 90: mod_base = OTHER; note = 2'-O-methyl uridine
  modified_base 91: mod_base = OTHER; note = 2'-O-methyl cytidine
  modified_base 92: mod_base = OTHER; note = 2'-O-methyl uridine
  modified_base 98: mod_base = OTHER; note = 2'-fluoro cytidine
  modified_base 99: mod_base = OTHER; note = 2'-fluoro guanosine
  modified_base 100: mod_base = OTHER; note = 2'-fluoro uridine phosphorothioate
  modified_base 101: mod_base = OTHER; note = 2'-fluoro uridine phosphorothioate
  modified_base 102: mod_base = OTHER; note = 2'-O-methyl uridine phosphorothioate
  modified_base 103: mod_base = OTHER; note = 2'-O-methyl adenosine

SEQ ID NO: 122 - RNA, 121 nt, synthetic construct
  source 1..121: mol_type = other RNA
  misc_difference 1: note = Any 2'-O-methyl nucleotide with a 3' phosphorothioate attached
  misc_difference 2: note = Any 2'-O-methyl nucleotide with a 3' phosphorothioate attached
  misc_difference 3: note = Any 2'-O-methyl nucleotide with a 3' phosphorothioate attached
  misc_difference 4: note = Any nucleotide
  misc_difference 5: note = Any nucleotide
  misc_difference 6: note = Any nucleotide
  misc_difference 7: note = Any nucleotide
  misc_difference 8: note = Any nucleotide
  misc_difference 9: note = Any nucleotide
  misc_difference 10: note = Any nucleotide
  misc_difference 11: note = Any nucleotide
  misc_difference 12: note = Any nucleotide
  misc_difference 13: note = Any nucleotide
  misc_difference 14: note = Any nucleotide
  misc_difference 15: note = Any nucleotide
  misc_difference 16: note = Any nucleotide
  misc_difference 17: note = Any nucleotide
  misc_difference 18: note = Any nucleotide
  misc_difference 19: note = Any nucleotide
  misc_difference 20: note = Any nucleotide
  misc_difference 21: note = Any nucleotide
  misc_difference 22: note = Any nucleotide
  misc_difference 23: note = Any nucleotide
  misc_difference 24: note = Any nucleotide
  modified_base 119: mod_base = OTHER; note = 2'-O-methyl uridine phosphorothioate
  modified_base 120: mod_base = OTHER; note = 2'-O-methyl uridine phosphorothioate
  modified_base 121: mod_base = OTHER; note = 2'-O-methyl adenosine
nnnnnnnnnnnnnnnnnnnnnnnngttgtagctcccgaaacgttgctacaataaggccgtctgaaaagatgtgccgcaacgctctgccccttaaagctcctgctttaaggggcatcgttta

SEQ ID NO: 123 - RNA, 121 nt, synthetic construct; identical to SEQ ID NO: 122
  source 1..121: mol_type = other RNA
  misc_difference 1: note = Any 2'-O-methyl nucleotide with a 3' phosphorothioate attached
  misc_difference 2: note = Any 2'-O-methyl nucleotide with a 3' phosphorothioate attached
  misc_difference 3: note = Any 2'-O-methyl nucleotide with a 3' phosphorothioate attached
  misc_difference 4: note = Any 2'-O-methyl nucleotide
  misc_difference 5: note = Any 2'-O-methyl nucleotide
  misc_difference 6: note = Any nucleotide
  misc_difference 7: note = Any nucleotide
  misc_difference 8: note = Any nucleotide
  misc_difference 9: note = Any nucleotide
  misc_difference 10: note = Any nucleotide
  misc_difference 11: note = Any nucleotide
  misc_difference 12: note = Any nucleotide
  misc_difference 13: note = Any nucleotide
  misc_difference 14: note = Any nucleotide
  misc_difference 15: note = Any nucleotide
  misc_difference 16: note = Any nucleotide
  misc_difference 17: note = Any nucleotide
  misc_difference 18: note = Any nucleotide
  misc_difference 19: note = Any nucleotide
  misc_difference 20: note = Any nucleotide
  misc_difference 21: note = Any nucleotide
  misc_difference 22: note = Any nucleotide
  misc_difference 23: note = Any nucleotide
  misc_difference 24: note = Any nucleotide
  modified_base 37: mod_base = OTHER; note = 2'-O-methyl guanosine
  modified_base 38: mod_base = OTHER; note = 2'-O-methyl adenosine
  modified_base 39: mod_base = OTHER; note = 2'-O-methyl adenosine
  modified_base 40: mod_base = OTHER; note = 2'-O-methyl adenosine
  modified_base 60: mod_base = OTHER; note = 2'-O-methyl uridine
  modified_base 61: mod_base = OTHER; note = 2'-O-methyl cytidine
  modified_base 62: mod_base = OTHER; note = 2'-O-methyl uridine
  modified_base 63: mod_base = OTHER; note = 2'-O-methyl guanosine
  modified_base 64: mod_base = OTHER; note = 2'-O-methyl adenosine
  modified_base 65: mod_base = OTHER; note = 2'-O-methyl adenosine
  modified_base 66: mod_base = OTHER; note = 2'-O-methyl adenosine
  modified_base 67: mod_base = OTHER; note = 2'-O-methyl adenosine
  modified_base 68: mod_base = OTHER; note = 2'-O-methyl guanosine
  modified_base 89: mod_base = OTHER; note = 2'-O-methyl cytidine
  modified_base 90: mod_base = OTHER; note = 2'-O-methyl cytidine
  modified_base 91: mod_base = OTHER; note = 2'-O-methyl uridine
  modified_base 92: mod_base = OTHER; note = 2'-O-methyl uridine
  modified_base 93: mod_base = OTHER; note = 2'-O-methyl adenosine
  modified_base 94: mod_base = OTHER; note = 2'-O-methyl adenosine
  modified_base 95: mod_base = OTHER; note = 2'-O-methyl adenosine
  modified_base 96: mod_base = OTHER; note = 2'-O-methyl guanosine
  modified_base 97: mod_base = OTHER; note = 2'-O-methyl cytidine
  modified_base 98: mod_base = OTHER; note = 2'-O-methyl uridine
  modified_base 99: mod_base = OTHER; note = 2'-O-methyl cytidine
  modified_base 100: mod_base = OTHER; note = 2'-O-methyl cytidine
  modified_base 101: mod_base = OTHER; note = 2'-O-methyl uridine
  modified_base 102: mod_base = OTHER; note = 2'-O-methyl guanosine
  modified_base 103: mod_base = OTHER; note = 2'-O-methyl cytidine
  modified_base 104: mod_base = OTHER; note = 2'-O-methyl uridine
  modified_base 105: mod_base = OTHER; note = 2'-O-methyl uridine
  modified_base 106: mod_base = OTHER; note = 2'-O-methyl uridine
  modified_base 107: mod_base = OTHER; note = 2'-O-methyl adenosine
  modified_base 108: mod_base = OTHER; note = 2'-O-methyl adenosine
  modified_base 109: mod_base = OTHER; note = 2'-O-methyl guanosine
  modified_base 110: mod_base = OTHER; note = 2'-O-methyl guanosine
  modified_base 116: mod_base = OTHER; note = 2'-O-methyl cytidine
  modified_base 117: mod_base = OTHER; note = 2'-O-methyl guanosine
  modified_base 118: mod_base = OTHER; note = 2'-O-methyl uridine phosphorothioate
  modified_base 119: mod_base = OTHER; note = 2'-O-methyl uridine phosphorothioate
  modified_base 120: mod_base = OTHER; note = 2'-O-methyl uridine phosphorothioate
  modified_base 121: mod_base = OTHER; note = 2'-O-methyl adenosine

SEQ ID NO: 124 - RNA, 121 nt, synthetic construct; identical to SEQ ID NO: 122
  source 1..121: mol_type = other RNA
  misc_difference 1: note = Any 2'-O-methyl nucleotide with a 3' phosphorothioate attached
  misc_difference 2: note = Any 2'-O-methyl nucleotide with a 3' phosphorothioate attached
  misc_difference 3: note = Any 2'-O-methyl nucleotide with a 3' phosphorothioate attached
  misc_difference 4: note = Any 2'-O-methyl nucleotide
  misc_difference 5: note = Any 2'-O-methyl nucleotide
  misc_difference 6: note = Any nucleotide
  misc_difference 7: note = Any nucleotide
  misc_difference 8: note = Any nucleotide
  misc_difference 9: note = Any 2'-O-methyl nucleotide
  misc_difference 10: note = Any 2'-O-methyl nucleotide
  misc_difference 11: note = Any 2'-O-methyl nucleotide
  misc_difference 12: note = Any nucleotide
  misc_difference 13: note = Any 2'-O-methyl nucleotide
  misc_difference 14: note = Any nucleotide
  misc_difference 15: note = Any nucleotide
  misc_difference 16: note = Any nucleotide
  misc_difference 17: note = Any nucleotide
  misc_difference 18: note = Any 2'-O-methyl nucleotide
  misc_difference 19: note = Any nucleotide
  misc_difference 20: note = Any nucleotide
  misc_difference 21: note = Any nucleotide
  misc_difference 22: note = Any 2'-O-methyl nucleotide
  misc_difference 23: note = Any nucleotide
  misc_difference 24: note = Any nucleotide
  modified_base 25: mod_base = OTHER; note = 2'-O-methyl guanosine
  modified_base 29: mod_base = OTHER; note = 2'-O-methyl uridine
  modified_base 30: mod_base = OTHER; note = 2'-O-methyl adenosine
  modified_base 31: mod_base = OTHER; note = 2'-O-methyl guanosine
  modified_base 32: mod_base = OTHER; note = 2'-O-methyl cytidine
  modified_base 37: mod_base = OTHER; note = 2'-O-methyl guanosine
  modified_base 38: mod_base = OTHER; note = 2'-O-methyl adenosine
  modified_base 39: mod_base = OTHER; note = 2'-O-methyl adenosine
  modified_base 40: mod_base = OTHER; note = 2'-O-methyl adenosine
  modified_base 60: mod_base = OTHER; note = 2'-O-methyl uridine
  modified_base 61: mod_base = OTHER; note = 2'-O-methyl cytidine
  modified_base 62: mod_base = OTHER; note = 2'-O-methyl uridine
  modified_base 63: mod_base = OTHER; note = 2'-O-methyl guanosine
  modified_base 64: mod_base = OTHER; note = 2'-O-methyl adenosine
  modified_base 65: mod_base = OTHER; note = 2'-O-methyl adenosine
  modified_base 66: mod_base = OTHER; note = 2'-O-methyl adenosine
  modified_base 67: mod_base = OTHER; note = 2'-O-methyl adenosine
  modified_base 68: mod_base = OTHER; note = 2'-O-methyl guanosine
  modified_base 89: mod_base = OTHER; note = 2'-O-methyl cytidine
  modified_base 90: mod_base = OTHER; note = 2'-O-methyl cytidine
  modified_base 91: mod_base = OTHER; note = 2'-O-methyl uridine
  modified_base 92: mod_base = OTHER; note = 2'-O-methyl uridine
  modified_base 93: mod_base = OTHER; note = 2'-O-methyl adenosine
  modified_base 94: mod_base = OTHER; note = 2'-O-methyl adenosine
  modified_base 95: mod_base = OTHER; note = 2'-O-methyl adenosine
  modified_base 96: mod_base = OTHER; note = 2'-O-methyl guanosine
  modified_base 97: mod_base = OTHER; note = 2'-O-methyl cytidine
  modified_base 98: mod_base = OTHER; note = 2'-O-methyl uridine
  modified_base 99: mod_base = OTHER; note = 2'-O-methyl cytidine
  modified_base 100: mod_base = OTHER; note = 2'-O-methyl cytidine
  modified_base 101: mod_base = OTHER; note = 2'-O-methyl uridine
  modified_base 102: mod_base = OTHER; note = 2'-O-methyl guanosine
  modified_base 103: mod_base = OTHER; note = 2'-O-methyl cytidine
  modified_base 104: mod_base = OTHER; note = 2'-O-methyl uridine
  modified_base 105: mod_base = OTHER; note = 2'-O-methyl uridine
  modified_base 106: mod_base = OTHER; note = 2'-O-methyl uridine
  modified_base 107: mod_base = OTHER; note = 2'-O-methyl adenosine
  modified_base 108: mod_base = OTHER; note = 2'-O-methyl adenosine
  modified_base 109: mod_base = OTHER; note = 2'-O-methyl guanosine
  modified_base 110: mod_base = OTHER; note = 2'-O-methyl guanosine
  modified_base 116: mod_base = OTHER; note = 2'-O-methyl cytidine
  modified_base 117: mod_base = OTHER; note = 2'-O-methyl guanosine
  modified_base 118: mod_base = OTHER; note = 2'-O-methyl uridine phosphorothioate
  modified_base 119: mod_base = OTHER; note = 2'-O-methyl uridine phosphorothioate
  modified_base 120: mod_base = OTHER; note = 2'-O-methyl uridine phosphorothioate
  modified_base 121: mod_base = OTHER; note = 2'-O-methyl adenosine

SEQ ID NO: 125 - RNA, 121 nt, synthetic construct; identical to SEQ ID NO: 122
  source 1..121: mol_type = other RNA
  misc_difference 1: note = Any 2'-O-methyl nucleotide with a 3' phosphorothioate attached
  misc_difference 2: note = Any 2'-O-methyl nucleotide with a 3' phosphorothioate attached
  misc_difference 3: note = Any 2'-O-methyl nucleotide with a 3' phosphorothioate attached
  misc_difference 4: note = Any 2'-O-methyl nucleotide
  misc_difference 5: note = Any 2'-O-methyl nucleotide
  misc_difference 6: note = Any 2'-O-methyl nucleotide
  misc_difference 7: note = Any 2'-O-methyl nucleotide
  misc_difference 8: note = Any 2'-O-methyl nucleotide
  misc_difference 9: note = Any 2'-O-methyl nucleotide
  misc_difference 10: note = Any 2'-O-methyl nucleotide
  misc_difference 11: note = Any 2'-O-methyl nucleotide
  misc_difference 12: note = Any 2'-O-methyl nucleotide
  misc_difference 13: note = Any 2'-O-methyl nucleotide
  misc_difference 14: note = Any 2'-O-methyl nucleotide
  misc_difference 15: note = Any nucleotide
  misc_difference 16: note = Any nucleotide
  misc_difference 17: note = Any nucleotide
  misc_difference 18: note = Any 2'-O-methyl nucleotide
  misc_difference 19: note = Any nucleotide
  misc_difference 20: note = Any nucleotide
  misc_difference 21: note = Any nucleotide
  misc_difference 22: note = Any 2'-O-methyl nucleotide
  misc_difference 23: note = Any nucleotide
  misc_difference 24: note = Any nucleotide
  modified_base 25: mod_base = OTHER; note = 2'-O-methyl guanosine
  modified_base 29: mod_base = OTHER; note = 2'-O-methyl uridine
  modified_base 30: mod_base = OTHER; note = 2'-O-methyl adenosine
  modified_base 31: mod_base = OTHER; note = 2'-O-methyl guanosine
  modified_base 32: mod_base = OTHER; note = 2'-O-methyl cytidine
  modified_base 37: mod_base = OTHER; note = 2'-O-methyl guanosine
  modified_base 38: mod_base = OTHER; note = 2'-O-methyl adenosine
  modified_base 39: mod_base = OTHER; note = 2'-O-methyl adenosine
  modified_base 40: mod_base = OTHER; note = 2'-O-methyl adenosine
  modified_base 60: mod_base = OTHER; note = 2'-O-methyl uridine
  modified_base 61: mod_base = OTHER; note = 2'-O-methyl cytidine
  modified_base 62: mod_base = OTHER; note = 2'-O-methyl uridine
  modified_base 63: mod_base = OTHER; note = 2'-O-methyl guanosine
  modified_base 64: mod_base = OTHER; note = 2'-O-methyl adenosine
  modified_base 65: mod_base = OTHER; note = 2'-O-methyl adenosine
  modified_base 66: mod_base = OTHER; note = 2'-O-methyl adenosine
  modified_base 67: mod_base = OTHER; note = 2'-O-methyl adenosine
  modified_base 68: mod_base = OTHER; note = 2'-O-methyl guanosine
  modified_base 89: mod_base = OTHER; note = 2'-O-methyl cytidine
  modified_base 90: mod_base = OTHER; note = 2'-O-methyl cytidine
  modified_base 91: mod_base = OTHER; note = 2'-O-methyl uridine
  modified_base 92: mod_base = OTHER; note = 2'-O-methyl uridine
  modified_base 93: mod_base = OTHER; note = 2'-O-methyl adenosine
  modified_base 94: mod_base = OTHER; note = 2'-O-methyl adenosine
  modified_base 95: mod_base = OTHER; note = 2'-O-methyl adenosine
  modified_base 96: mod_base = OTHER; note = 2'-O-methyl guanosine
  modified_base 97: mod_base = OTHER; note = 2'-O-methyl cytidine
  modified_base 98: mod_base = OTHER; note = 2'-O-methyl uridine
  modified_base 99: mod_base = OTHER; note = 2'-O-methyl cytidine
  modified_base 100: mod_base = OTHER; note = 2'-O-methyl cytidine
  modified_base 101: mod_base = OTHER; note = 2'-O-methyl uridine
  modified_base 102: mod_base = OTHER; note = 2'-O-methyl guanosine
  modified_base 103: mod_base = OTHER; note = 2'-O-methyl cytidine
  modified_base 104: mod_base = OTHER; note = 2'-O-methyl uridine
  modified_base 105: mod_base = OTHER; note = 2'-O-methyl uridine
  modified_base 106: mod_base = OTHER; note = 2'-O-methyl uridine
  modified_base 107: mod_base = OTHER; note = 2'-O-methyl adenosine
  modified_base 108: mod_base = OTHER; note = 2'-O-methyl adenosine
  modified_base 109: mod_base = OTHER; note = 2'-O-methyl guanosine
  modified_base 110: mod_base = OTHER; note = 2'-O-methyl guanosine
  modified_base 116: mod_base = OTHER; note = 2'-O-methyl cytidine
  modified_base 117: mod_base = OTHER; note = 2'-O-methyl guanosine
  modified_base 118: mod_base = OTHER; note = 2'-O-methyl uridine phosphorothioate
  modified_base 119: mod_base = OTHER; note = 2'-O-methyl uridine phosphorothioate
  modified_base 120: mod_base = OTHER; note = 2'-O-methyl uridine phosphorothioate
  modified_base 121: mod_base = OTHER; note = 2'-O-methyl adenosine

SEQ ID NO: 126 - RNA, 42 nt, synthetic construct
  source 1..42: mol_type = other RNA
  modified_base 1: mod_base = OTHER; note = 2'-O-methyl cytidine
  modified_base 2: mod_base = OTHER; note = 2'-O-methyl uridine
  modified_base 3: mod_base = OTHER; note = 2'-O-methyl guanosine
  modified_base 38: mod_base = OTHER; note = 2'-O-methyl uridine
  modified_base 39: mod_base = OTHER; note = 2'-O-methyl uridine
  modified_base 40: mod_base = OTHER; note = 2'-O-methyl cytidine
  modified_base 41: mod_base = OTHER; note = 2'-O-methyl uridine
  modified_base 42: mod_base = OTHER; note = 2'-O-methyl cytidine
ctgaacttgtggccgtttacgtcggttgtagctccctttctc

SEQ ID NO: 127 - RNA, 42 nt, synthetic construct; identical to SEQ ID NO: 126
  source 1..42: mol_type = other RNA
  modified_base 1: mod_base = OTHER; note = 2'-O-methyl cytidine phosphorothioate
  modified_base 2: mod_base = OTHER; note = 2'-O-methyl uridine phosphorothioate
  modified_base 3: mod_base = OTHER; note = 2'-O-methyl guanosine phosphorothioate
  modified_base 38: mod_base = OTHER; note = 2'-O-methyl uridine
  modified_base 39: mod_base = OTHER; note = 2'-O-methyl uridine phosphorothioate
  modified_base 40: mod_base = OTHER; note = 2'-O-methyl cytidine phosphorothioate
  modified_base 41: mod_base = OTHER; note = 2'-O-methyl uridine phosphorothioate
  modified_base 42: mod_base = OTHER; note = 2'-O-methyl cytidine

SEQ ID NO: 128 - RNA, 42 nt, synthetic construct; identical to SEQ ID NO: 126
  source 1..42: mol_type = other RNA
  modified_base 1: mod_base = OTHER; note = 2'-O-methyl cytidine phosphorothioate
  modified_base 2: mod_base = OTHER; note = 2'-O-methyl uridine
  modified_base 3: mod_base = OTHER; note = 2'-O-methyl guanosine
  modified_base 38: mod_base = OTHER; note = 2'-O-methyl uridine
  modified_base 39: mod_base = OTHER; note = 2'-O-methyl uridine phosphorothioate
  modified_base 40: mod_base = OTHER; note = 2'-O-methyl cytidine phosphorothioate
  modified_base 41: mod_base = OTHER; note = 2'-O-methyl uridine phosphorothioate
  modified_base 42: mod_base = OTHER; note = 2'-O-methyl cytidine

SEQ ID NO: 129 - RNA, 42 nt, synthetic construct; identical to SEQ ID NO: 126
  source 1..42: mol_type = other RNA
  modified_base 1: mod_base = OTHER; note = 2'-O-methyl cytidine phosphorothioate
  modified_base 2: mod_base = OTHER; note = 2'-O-methyl uridine phosphorothioate
  modified_base 3: mod_base = OTHER; note = 2'-O-methyl guanosine phosphorothioate
  modified_base 4: mod_base = OTHER; note = 2'-O-methyl adenosine
  modified_base 5: mod_base = OTHER; note = 2'-O-methyl adenosine
  modified_base 9: mod_base = OTHER; note = 2'-O-methyl guanosine
  modified_base 10: mod_base = OTHER; note = 2'-O-methyl uridine
  modified_base 11: mod_base = OTHER; note = 2'-O-methyl guanosine
  modified_base 13: mod_base = OTHER; note = 2'-O-methyl cytidine
  modified_base 18: mod_base = OTHER; note = 2'-O-methyl uridine
  modified_base 22: mod_base = OTHER; note = 2'-O-methyl uridine
  modified_base 25: mod_base = OTHER; note = 2'-O-methyl guanosine
  modified_base 29: mod_base = OTHER; note = 2'-O-methyl uridine
  modified_base 30: mod_base = OTHER; note = 2'-O-methyl adenosine
  modified_base 31: mod_base = OTHER; note = 2'-O-methyl guanosine
  modified_base 32: mod_base = OTHER; note = 2'-O-methyl cytidine
  modified_base 38: mod_base = OTHER; note = 2'-O-methyl uridine
  modified_base 39: mod_base = OTHER; note = 2'-O-methyl uridine phosphorothioate
  modified_base 40: mod_base = OTHER; note = 2'-O-methyl cytidine phosphorothioate
  modified_base 41: mod_base = OTHER; note = 2'-O-methyl uridine phosphorothioate
  modified_base 42: mod_base = OTHER; note = 2'-O-methyl cytidine

SEQ ID NO: 130 - RNA, 42 nt, synthetic construct; identical to SEQ ID NO: 126
  source 1..42: mol_type = other RNA
  modified_base 1: mod_base = OTHER; note = 2'-O-methyl cytidine phosphorothioate
  modified_base 2: mod_base = OTHER; note = 2'-O-methyl uridine phosphorothioate
  modified_base 3: mod_base = OTHER; note = 2'-O-methyl guanosine phosphorothioate
  modified_base 4: mod_base = OTHER; note = 2'-O-methyl adenosine
  modified_base 5: mod_base = OTHER; note = 2'-O-methyl adenosine
  modified_base 6: mod_base = OTHER; note = 2'-O-methyl cytidine
  modified_base 9: mod_base = OTHER; note = 2'-O-methyl guanosine
  modified_base 10: mod_base = OTHER; note = 2'-O-methyl uridine
  modified_base 11: mod_base = OTHER; note = 2'-O-methyl guanosine
  modified_base 13: mod_base = OTHER; note = 2'-O-methyl cytidine
  modified_base 18: mod_base = OTHER; note = 2'-O-methyl uridine
  modified_base 22: mod_base = OTHER; note = 2'-O-methyl uridine
  modified_base 25: mod_base = OTHER; note = 2'-O-methyl guanosine
  modified_base 29: mod_base = OTHER; note = 2'-O-methyl uridine
  modified_base 30: mod_base = OTHER; note = 2'-O-methyl adenosine
  modified_base 31: mod_base = OTHER; note = 2'-O-methyl guanosine
  modified_base 32: mod_base = OTHER; note = 2'-O-methyl cytidine
  modified_base 38: mod_base = OTHER; note = 2'-O-methyl uridine
  modified_base 39: mod_base = OTHER; note = 2'-O-methyl uridine phosphorothioate
  modified_base 40: mod_base = OTHER; note = 2'-O-methyl cytidine phosphorothioate
  modified_base 41: mod_base = OTHER; note = 2'-O-methyl uridine phosphorothioate
  modified_base 42: mod_base = OTHER; note = 2'-O-methyl cytidine

SEQ ID NO: 131 - RNA, 42 nt, synthetic construct; identical to SEQ ID NO: 126
  source 1..42: mol_type = other RNA
  modified_base 1: mod_base = OTHER; note = 2'-O-methyl cytidine phosphorothioate
  modified_base 2: mod_base = OTHER; note = 2'-O-methyl uridine phosphorothioate
  modified_base 3: mod_base = OTHER; note = 2'-O-methyl guanosine phosphorothioate
  modified_base 4: mod_base = OTHER; note = 2'-O-methyl adenosine
  modified_base 5: mod_base = OTHER; note = 2'-O-methyl adenosine
  modified_base 7: mod_base = OTHER; note = 2'-O-methyl uridine
  modified_base 9: mod_base = OTHER; note = 2'-O-methyl guanosine
  modified_base 10: mod_base = OTHER; note = 2'-O-methyl uridine
  modified_base 11: mod_base = OTHER; note = 2'-O-methyl guanosine
  modified_base 13: mod_base = OTHER; note = 2'-O-methyl cytidine
  modified_base 18: mod_base = OTHER; note = 2'-O-methyl uridine
  modified_base 22: mod_base = OTHER; note = 2'-O-methyl uridine
  modified_base 25: mod_base = OTHER; note = 2'-O-methyl guanosine
  modified_base 29: mod_base = OTHER; note = 2'-O-methyl uridine
  modified_base 30: mod_base = OTHER; note = 2'-O-methyl adenosine
  modified_base 31: mod_base = OTHER; note = 2'-O-methyl guanosine
  modified_base 32: mod_base = OTHER; note = 2'-O-methyl cytidine
  modified_base 38: mod_base = OTHER; note = 2'-O-methyl uridine
  modified_base 39: mod_base = OTHER; note = 2'-O-methyl uridine phosphorothioate
  modified_base 40: mod_base = OTHER; note = 2'-O-methyl cytidine phosphorothioate
  modified_base 41: mod_base = OTHER; note = 2'-O-methyl uridine phosphorothioate
  modified_base 42: mod_base = OTHER; note = 2'-O-methyl cytidine

SEQ ID NO: 132 - RNA, 42 nt, synthetic construct; identical to SEQ ID NO: 126
  source 1..42: mol_type = other RNA
  modified_base 1: mod_base = OTHER; note = 2'-O-methyl cytidine phosphorothioate
  modified_base 2: mod_base = OTHER; note = 2'-O-methyl uridine phosphorothioate
  modified_base 3: mod_base = OTHER; note = 2'-O-methyl guanosine phosphorothioate
  modified_base 4: mod_base = OTHER; note = 2'-O-methyl adenosine
  modified_base 5: mod_base = OTHER; note = 2'-O-methyl adenosine
  modified_base 8: mod_base = OTHER; note = 2'-O-methyl uridine
  modified_base 9: mod_base = OTHER; note = 2'-O-methyl guanosine
  modified_base 10: mod_base = OTHER; note = 2'-O-methyl uridine
  modified_base 11: mod_base = OTHER; note = 2'-O-methyl guanosine
  modified_base 13: mod_base = OTHER; note = 2'-O-methyl cytidine
  modified_base 18: mod_base = OTHER; note = 2'-O-methyl uridine
  modified_base 22: mod_base = OTHER; note = 2'-O-methyl uridine
  modified_base 25: mod_base = OTHER; note = 2'-O-methyl guanosine
  modified_base 29: mod_base = OTHER; note = 2'-O-methyl uridine
  modified_base 30: mod_base = OTHER; note = 2'-O-methyl adenosine
  modified_base 31: mod_base = OTHER; note = 2'-O-methyl guanosine
  modified_base 32: mod_base = OTHER; note = 2'-O-methyl cytidine
  modified_base 38: mod_base = OTHER; note = 2'-O-methyl uridine
  modified_base 39: mod_base = OTHER; note = 2'-O-methyl uridine phosphorothioate
  modified_base 40: mod_base = OTHER; note = 2'-O-methyl cytidine phosphorothioate
  modified_base 41: mod_base = OTHER; note = 2'-O-methyl uridine phosphorothioate
  modified_base 42: mod_base = OTHER; note = 2'-O-methyl cytidine

SEQ ID NO: 133 - RNA, 42 nt, synthetic construct; identical to SEQ ID NO: 126
  source 1..42: mol_type = other RNA
  modified_base 1: mod_base = OTHER; note = 2'-O-methyl cytidine phosphorothioate
  modified_base 2: mod_base = OTHER; note = 2'-O-methyl uridine phosphorothioate
  modified_base 3: mod_base = OTHER; note = 2'-O-methyl guanosine phosphorothioate
  modified_base 4: mod_base = OTHER; note = 2'-O-methyl adenosine
  modified_base 5: mod_base = OTHER; note = 2'-O-methyl adenosine
  modified_base 9: mod_base = OTHER; note = 2'-O-methyl guanosine
  modified_base 10: mod_base = OTHER; note = 2'-O-methyl uridine
  modified_base 11: mod_base = OTHER; note = 2'-O-methyl guanosine
  modified_base 12: mod_base = OTHER; note = 2'-O-methyl guanosine
  modified_base 13: mod_base = OTHER; note = 2'-O-methyl cytidine
  modified_base 18: mod_base = OTHER; note = 2'-O-methyl uridine
  modified_base 22: mod_base = OTHER; note = 2'-O-methyl uridine
  modified_base 25: mod_base = OTHER; note = 2'-O-methyl guanosine
  modified_base 29: mod_base = OTHER; note = 2'-O-methyl uridine
  modified_base 30: mod_base = OTHER; note = 2'-O-methyl adenosine
  modified_base 31: mod_base = OTHER; note = 2'-O-methyl guanosine
  modified_base 32: mod_base = OTHER; note = 2'-O-methyl cytidine
  modified_base 38: mod_base = OTHER; note = 2'-O-methyl uridine
  modified_base 39: mod_base = OTHER; note = 2'-O-methyl uridine phosphorothioate
  modified_base 40: mod_base = OTHER; note = 2'-O-methyl cytidine phosphorothioate
  modified_base 41: mod_base = OTHER; note = 2'-O-methyl uridine phosphorothioate
  modified_base 42: mod_base = OTHER; note = 2'-O-methyl cytidine

SEQ ID NO: 134 - RNA, 42 nt, synthetic construct; identical to SEQ ID NO: 126
  source 1..42: mol_type = other RNA
  modified_base 1: mod_base = OTHER; note = 2'-O-methyl cytidine phosphorothioate
  modified_base 2: mod_base = OTHER; note = 2'-O-methyl uridine phosphorothioate
  modified_base 3: mod_base = OTHER; note = 2'-O-methyl guanosine phosphorothioate
  modified_base 4: mod_base = OTHER; note = 2'-O-methyl adenosine
  modified_base 5: mod_base = OTHER; note = 2'-O-methyl adenosine
  modified_base 9: mod_base = OTHER; note = 2'-O-methyl guanosine
  modified_base 10: mod_base = OTHER; note = 2'-O-methyl uridine
  modified_base 11: mod_base = OTHER; note = 2'-O-methyl guanosine
  modified_base 13: mod_base = OTHER; note = 2'-O-methyl cytidine
  modified_base 14: mod_base = OTHER; note = 2'-O-methyl cytidine
  modified_base 18: mod_base = OTHER; note = 2'-O-methyl uridine
  modified_base 22: mod_base = OTHER; note = 2'-O-methyl uridine
  modified_base 25: mod_base = OTHER; note = 2'-O-methyl guanosine
  modified_base 29: mod_base = OTHER; note = 2'-O-methyl uridine
  modified_base 30: mod_base = OTHER; note = 2'-O-methyl adenosine
  modified_base 31: mod_base = OTHER; note = 2'-O-methyl guanosine
  modified_base 32: mod_base = OTHER; note = 2'-O-methyl cytidine
  modified_base 38: mod_base = OTHER; note = 2'-O-methyl uridine
  modified_base 39: mod_base = OTHER; note = 2'-O-methyl uridine phosphorothioate
  modified_base 40: mod_base = OTHER; note = 2'-O-methyl cytidine phosphorothioate
  modified_base 41: mod_base = OTHER; note = 2'-O-methyl uridine phosphorothioate
  modified_base 42: mod_base = OTHER; note = 2'-O-methyl cytidine

SEQ ID NO: 135 - RNA, 42 nt, synthetic construct; identical to SEQ ID NO: 126
  source 1..42: mol_type = other RNA
  modified_base 1: mod_base = OTHER; note = 2'-O-methyl cytidine phosphorothioate
  modified_base 2: mod_base = OTHER; note = 2'-O-methyl uridine phosphorothioate
  modified_base 3: mod_base = OTHER; note = 2'-O-methyl guanosine phosphorothioate
  modified_base 4: mod_base = OTHER; note = 2'-O-methyl adenosine
  modified_base 5: mod_base = OTHER; note = 2'-O-methyl adenosine
  modified_base 9: mod_base = OTHER; note = 2'-O-methyl guanosine
  modified_base 10: mod_base = OTHER; note = 2'-O-methyl uridine
  modified_base 11: mod_base = OTHER; note = 2'-O-methyl guanosine
  modified_base 13: mod_base = OTHER; note = 2'-O-methyl cytidine
  modified_base 15: mod_base = OTHER; note = 2'-O-methyl guanosine
  modified_base 18: mod_base = OTHER; note = 2'-O-methyl uridine
  modified_base 22: mod_base = OTHER; note = 2'-O-methyl uridine
  modified_base 25: mod_base = OTHER; note = 2'-O-methyl guanosine
  modified_base 29: mod_base = OTHER; note = 2'-O-methyl uridine
  modified_base 30: mod_base = OTHER; note = 2'-O-methyl adenosine
  modified_base 31: mod_base = OTHER; note = 2'-O-methyl guanosine
  modified_base 32: mod_base = OTHER; note = 2'-O-methyl cytidine
  modified_base 38: mod_base = OTHER; note = 2'-O-methyl uridine
  modified_base 39: mod_base = OTHER; note = 2'-O-methyl uridine phosphorothioate
  modified_base 40: mod_base = OTHER; note = 2'-O-methyl cytidine phosphorothioate
  modified_base 41: mod_base = OTHER; note = 2'-O-methyl uridine phosphorothioate
  modified_base 42: mod_base = OTHER; note = 2'-O-methyl cytidine

SEQ ID NO: 136 - RNA, 42 nt, synthetic construct; identical to SEQ ID NO: 126
  source 1..42: mol_type = other RNA
  modified_base 1: mod_base = OTHER; note = 2'-O-methyl cytidine phosphorothioate
  modified_base 2: mod_base = OTHER; note = 2'-O-methyl uridine phosphorothioate
  modified_base 3: mod_base = OTHER; note = 2'-O-methyl guanosine phosphorothioate
  modified_base 4: mod_base = OTHER; note = 2'-O-methyl adenosine
  modified_base 5: mod_base = OTHER; note = 2'-O-methyl adenosine
  modified_base 9: mod_base = OTHER; note = 2'-O-methyl guanosine
  modified_base 10: mod_base = OTHER; note = 2'-O-methyl uridine
  modified_base 11: mod_base = OTHER; note = 2'-O-methyl guanosine
  modified_base 13: mod_base = OTHER; note = 2'-O-methyl cytidine
  modified_base 16: mod_base = OTHER; note = 2'-O-methyl uridine
  modified_base 18: mod_base = OTHER; note = 2'-O-methyl uridine
  modified_base 22: mod_base = OTHER; note = 2'-O-methyl uridine
  modified_base 25: mod_base = OTHER; note = 2'-O-methyl guanosine
  modified_base 29: mod_base = OTHER; note = 2'-O-methyl uridine
  modified_base 30: mod_base = OTHER; note = 2'-O-methyl adenosine
  modified_base 31: mod_base = OTHER; note = 2'-O-methyl guanosine
  modified_base 32: mod_base = OTHER; note = 2'-O-methyl cytidine
  modified_base 38: mod_base = OTHER; note = 2'-O-methyl uridine
  modified_base 39: mod_base = OTHER; note = 2'-O-methyl uridine phosphorothioate
  modified_base 40: mod_base = OTHER; note = 2'-O-methyl cytidine phosphorothioate
  modified_base 41: mod_base = OTHER; note = 2'-O-methyl uridine phosphorothioate
  modified_base 42: mod_base = OTHER; note = 2'-O-methyl cytidine

SEQ ID NO: 137 - RNA, 42 nt, synthetic construct; identical to SEQ ID NO: 126
  source 1..42: mol_type = other RNA
  modified_base 1: mod_base = OTHER; note = 2'-O-methyl cytidine phosphorothioate
  modified_base 2: mod_base = OTHER; note = 2'-O-methyl uridine phosphorothioate
  modified_base 3: mod_base = OTHER; note = 2'-O-methyl guanosine phosphorothioate
  modified_base 4: mod_base = OTHER; note = 2'-O-methyl adenosine
  modified_base 5: mod_base = OTHER; note = 2'-O-methyl adenosine
  modified_base 9: mod_base = OTHER; note = 2'-O-methyl guanosine
  modified_base 10: mod_base = OTHER; note = 2'-O-methyl uridine
  modified_base 11: mod_base = OTHER; note = 2'-O-methyl guanosine
  modified_base 13: mod_base = OTHER; note = 2'-O-methyl cytidine
  modified_base 17: mod_base = OTHER; note = 2'-O-methyl uridine
  modified_base 18: mod_base = OTHER; note = 2'-O-methyl uridine
  modified_base 22: mod_base = OTHER; note = 2'-O-methyl uridine
  modified_base 25: mod_base = OTHER; note = 2'-O-methyl guanosine
  modified_base 29: mod_base = OTHER; note = 2'-O-methyl uridine
  modified_base 30: mod_base = OTHER; note = 2'-O-methyl adenosine
  modified_base 31: mod_base = OTHER; note = 2'-O-methyl guanosine
  modified_base 32: mod_base = OTHER; note = 2'-O-methyl cytidine
  modified_base 38: mod_base = OTHER; note = 2'-O-methyl uridine
  modified_base 39: mod_base = OTHER; note = 2'-O-methyl uridine phosphorothioate
  modified_base 40: mod_base = OTHER; note = 2'-O-methyl cytidine phosphorothioate
  modified_base 41: mod_base = OTHER; note = 2'-O-methyl uridine phosphorothioate
  modified_base 42: mod_base = OTHER; note = 2'-O-methyl cytidine

SEQ ID NO: 138 - RNA, 42 nt, synthetic construct; identical to SEQ ID NO: 126
  source 1..42: mol_type = other RNA
  modified_base 1: mod_base = OTHER; note = 2'-O-methyl cytidine phosphorothioate
  modified_base 2: mod_base = OTHER; note = 2'-O-methyl uridine phosphorothioate
  modified_base 3: mod_base = OTHER; note = 2'-O-methyl guanosine phosphorothioate
  modified_base 4: mod_base = OTHER; note = 2'-O-methyl adenosine
  modified_base 5: mod_base = OTHER; note = 2'-O-methyl adenosine
  modified_base 9: mod_base = OTHER; note = 2'-O-methyl guanosine
  modified_base 10: mod_base = OTHER; note = 2'-O-methyl uridine
  modified_base 11: mod_base = OTHER; note = 2'-O-methyl guanosine
  modified_base 13: mod_base = OTHER; note = 2'-O-methyl cytidine
  modified_base 18: mod_base = OTHER; note = 2'-O-methyl uridine
  modified_base 19: mod_base = OTHER; note = 2'-O-methyl adenosine
  modified_base 22: mod_base = OTHER; note = 2'-O-methyl uridine
  modified_base 25: mod_base = OTHER; note = 2'-O-methyl guanosine
  modified_base 29: mod_base = OTHER; note = 2'-O-methyl uridine
  modified_base 30: mod_base = OTHER; note = 2'-O-methyl adenosine
  modified_base 31: mod_base = OTHER; note = 2'-O-methyl guanosine
  modified_base 32: mod_base = OTHER; note = 2'-O-methyl cytidine
  modified_base 38: mod_base = OTHER; note = 2'-O-methyl uridine
  modified_base 39: mod_base = OTHER; note = 2'-O-methyl uridine phosphorothioate
  modified_base 40: mod_base = OTHER; note = 2'-O-methyl cytidine phosphorothioate
  modified_base 41: mod_base = OTHER; note = 2'-O-methyl uridine phosphorothioate
  modified_base 42: mod_base = OTHER; note = 2'-O-methyl cytidine

SEQ ID NO: 139 - RNA, 42 nt, synthetic construct; identical to SEQ ID NO: 126
  source 1..42: mol_type = other RNA
  modified_base 1: mod_base = OTHER; note = 2'-O-methyl cytidine phosphorothioate
  modified_base 2: mod_base = OTHER; note = 2'-O-methyl uridine phosphorothioate
  modified_base 3: mod_base = OTHER; note = 2'-O-methyl guanosine phosphorothioate
  modified_base 4: mod_base = OTHER; note = 2'-O-methyl adenosine
  modified_base 5: mod_base = OTHER; note = 2'-O-methyl adenosine
  modified_base 9: mod_base = OTHER; note = 2'-O-methyl guanosine
  modified_base 10: mod_base = OTHER; note = 2'-O-methyl uridine
  modified_base 11: mod_base = OTHER; note = 2'-O-methyl guanosine
  modified_base 13: mod_base = OTHER; note = 2'-O-methyl cytidine
  modified_base 18: mod_base = OTHER; note = 2'-O-methyl uridine
  modified_base 20: mod_base = OTHER; note = 2'-O-methyl cytidine
  modified_base 22: mod_base = OTHER; note = 2'-O-methyl uridine
  modified_base 25: mod_base = OTHER; note = 2'-O-methyl guanosine
  modified_base 29: mod_base = OTHER; note = 2'-O-methyl uridine
  modified_base 30: mod_base = OTHER; note = 2'-O-methyl adenosine
  modified_base 31: mod_base = OTHER; note = 2'-O-methyl guanosine
  modified_base 32: mod_base = OTHER; note = 2'-O-methyl cytidine
  modified_base 38: mod_base = OTHER; note = 2'-O-methyl uridine
  modified_base 39: mod_base = OTHER; note = 2'-O-methyl uridine phosphorothioate
  modified_base 40: mod_base = OTHER; note = 2'-O-methyl cytidine phosphorothioate
  modified_base 41: mod_base = OTHER; note = 2'-O-methyl uridine phosphorothioate
  modified_base 42: mod_base = OTHER; note = 2'-O-methyl cytidine

SEQ ID NO: 140 - RNA, 42 nt, synthetic construct; identical to SEQ ID NO: 126
  source 1..42: mol_type = other RNA
  modified_base 1: mod_base = OTHER; note = 2'-O-methyl cytidine phosphorothioate
  modified_base 2: mod_base = OTHER; note = 2'-O-methyl uridine phosphorothioate
  modified_base 3: mod_base = OTHER; note = 2'-O-methyl guanosine phosphorothioate
  modified_base 4: mod_base = OTHER; note = 2'-O-methyl adenosine
  modified_base 5: mod_base = OTHER; note = 2'-O-methyl adenosine
  modified_base 9: mod_base = OTHER; note = 2'-O-methyl guanosine
  modified_base 10: mod_base = OTHER; note = 2'-O-methyl uridine
  modified_base 11: mod_base = OTHER; note = 2'-O-methyl guanosine
  modified_base 13: mod_base = OTHER; note = 2'-O-methyl cytidine
  modified_base 18: mod_base = OTHER; note = 2'-O-methyl uridine
  modified_base 21: mod_base = OTHER; note = 2'-O-methyl guanosine
  modified_base 22: mod_base = OTHER; note = 2'-O-methyl uridine
  modified_base 25: mod_base = OTHER; note = 2'-O-methyl guanosine
  modified_base 29: mod_base = OTHER; note = 2'-O-methyl uridine
  modified_base 30: mod_base = OTHER; note = 2'-O-methyl adenosine
  modified_base 31: mod_base = OTHER; note = 2'-O-methyl guanosine
  modified_base 32: mod_base = OTHER; note = 2'-O-methyl cytidine
  modified_base 38: mod_base = OTHER; note = 2'-O-methyl uridine
  modified_base 39: mod_base = OTHER; note = 2'-O-methyl uridine phosphorothioate
  modified_base 40: mod_base = OTHER; note = 2'-O-methyl cytidine phosphorothioate
  modified_base 41: mod_base = OTHER; note = 2'-O-methyl uridine phosphorothioate
  modified_base 42: mod_base = OTHER; note = 2'-O-methyl cytidine

SEQ ID NO: 141 - RNA, 42 nt, synthetic construct; identical to SEQ ID NO: 126
  source 1..42: mol_type = other RNA
  modified_base 1: mod_base = OTHER; note = 2'-O-methyl cytidine phosphorothioate
  modified_base 2: mod_base = OTHER; note = 2'-O-methyl uridine phosphorothioate
  modified_base 3: mod_base = OTHER; note = 2'-O-methyl guanosine phosphorothioate
  modified_base 4: mod_base = OTHER; note = 2'-O-methyl adenosine
  modified_base 5: mod_base = OTHER; note = 2'-O-methyl adenosine
  modified_base 9: mod_base = OTHER; note = 2'-O-methyl guanosine
  modified_base 10: mod_base = OTHER; note = 2'-O-methyl uridine
  modified_base 11: mod_base = OTHER; note = 2'-O-methyl guanosine
  modified_base 13: mod_base = OTHER; note = 2'-O-methyl cytidine
  modified_base 18: mod_base = OTHER; note = 2'-O-methyl uridine
  modified_base 22: mod_base = OTHER; note = 2'-O-methyl uridine
  modified_base 23: mod_base = OTHER; note = 2'-O-methyl cytidine
  modified_base 25: mod_base = OTHER; note = 2'-O-methyl guanosine
  modified_base 29: mod_base = OTHER; note = 2'-O-methyl uridine
  modified_base 30: mod_base = OTHER; note = 2'-O-methyl adenosine
  modified_base 31: mod_base = OTHER; note = 2'-O-methyl guanosine
  modified_base 32: mod_base = OTHER; note = 2'-O-methyl cytidine
  modified_base 38: mod_base = OTHER; note = 2'-O-methyl uridine
  modified_base 39: mod_base = OTHER; note = 2'-O-methyl uridine phosphorothioate
  modified_base 40: mod_base = OTHER; note = 2'-O-methyl cytidine phosphorothioate
  modified_base 41: mod_base = OTHER; note = 2'-O-methyl uridine phosphorothioate
  modified_base 42: mod_base = OTHER; note = 2'-O-methyl cytidine

SEQ ID NO: 142 - RNA, 42 nt, synthetic construct; identical to SEQ ID NO: 126
  source 1..42: mol_type = other RNA
  modified_base 1: mod_base = OTHER; note = 2'-O-methyl cytidine phosphorothioate
  modified_base 2: mod_base = OTHER; note = 2'-O-methyl uridine phosphorothioate
  modified_base 3: mod_base = OTHER; note = 2'-O-methyl guanosine phosphorothioate
  modified_base 4: mod_base = OTHER; note = 2'-O-methyl adenosine
  modified_base 5: mod_base = OTHER; note = 2'-O-methyl adenosine
  modified_base 9: mod_base = OTHER; note = 2'-O-methyl guanosine
  modified_base 10: mod_base = OTHER; note = 2'-O-methyl uridine
  modified_base 11: mod_base = OTHER; note = 2'-O-methyl guanosine
  modified_base 13: mod_base = OTHER; note = 2'-O-methyl cytidine
  modified_base 18: mod_base = OTHER; note = 2'-O-methyl uridine
  modified_base 22: mod_base = OTHER; note = 2'-O-methyl uridine
  modified_base 24: mod_base = OTHER; note = 2'-O-methyl guanosine
  modified_base 25: mod_base = OTHER; note = 2'-O-methyl guanosine
  modified_base 29: mod_base = OTHER; note = 2'-O-methyl uridine
  modified_base 30: mod_base = OTHER; note = 2'-O-methyl adenosine
  modified_base 31: mod_base = OTHER; note = 2'-O-methyl guanosine
  modified_base 32: mod_base = OTHER; note = 2'-O-methyl cytidine
  modified_base 38: mod_base = OTHER; note = 2'-O-methyl uridine
  modified_base 39: mod_base = OTHER; note = 2'-O-methyl uridine phosphorothioate
  modified_base 40: mod_base = OTHER; note = 2'-O-methyl cytidine phosphorothioate
  modified_base 41: mod_base = OTHER; note = 2'-O-methyl uridine phosphorothioate
  modified_base 42: mod_base = OTHER; note = 2'-O-methyl cytidine

SEQ ID NO: 143 - RNA, 42 nt, synthetic construct; identical to SEQ ID NO: 126
  source 1..42: mol_type = other RNA
  modified_base 1: mod_base = OTHER; note = 2'-O-methyl cytidine phosphorothioate
  modified_base 2: mod_base = OTHER; note = 2'-O-methyl uridine phosphorothioate
  modified_base 3: mod_base = OTHER; note = 2'-O-methyl guanosine phosphorothioate
  modified_base 4: mod_base = OTHER; note = 2'-O-methyl adenosine
  modified_base 5: mod_base = OTHER; note = 2'-O-methyl adenosine
  modified_base 9: mod_base = OTHER; note = 2'-O-methyl guanosine
  modified_base 10: mod_base = OTHER; note = 2'-O-methyl uridine
  modified_base 11: mod_base = OTHER; note = 2'-O-methyl guanosine
  modified_base 13: mod_base = OTHER; note = 2'-O-methyl cytidine
  modified_base 18: mod_base = OTHER; note = 2'-O-methyl uridine
  modified_base 22: mod_base = OTHER; note = 2'-O-methyl uridine
  modified_base 25: mod_base = OTHER; note = 2'-O-methyl guanosine
  modified_base 26: mod_base = OTHER; note = 2'-O-methyl uridine
  modified_base 29: mod_base = OTHER; note = 2'-O-methyl uridine
  modified_base 30: mod_base = OTHER; note = 2'-O-methyl adenosine
  modified_base 31: mod_base = OTHER; note = 2'-O-methyl guanosine
  modified_base 32: mod_base = OTHER; note = 2'-O-methyl cytidine
  modified_base 38: mod_base = OTHER; note = 2'-O-methyl uridine
  modified_base 39: mod_base = OTHER; note = 2'-O-methyl uridine phosphorothioate
  modified_base 40: mod_base = OTHER; note = 2'-O-methyl cytidine phosphorothioate
  modified_base 41: mod_base = OTHER; note = 2'-O-methyl uridine phosphorothioate
  modified_base 42: mod_base = OTHER; note = 2'-O-methyl cytidine

SEQ ID NO: 144 - RNA, 42 nt, synthetic construct; identical to SEQ ID NO: 126
  source 1..42: mol_type = other RNA
  modified_base 1: mod_base = OTHER; note = 2'-O-methyl cytidine phosphorothioate
  modified_base 2: mod_base = OTHER; note = 2'-O-methyl uridine phosphorothioate
  modified_base 3: mod_base = OTHER; note = 2'-O-methyl guanosine phosphorothioate
  modified_base 4: mod_base = OTHER; note = 2'-O-methyl adenosine
  modified_base 5: mod_base = OTHER; note = 2'-O-methyl adenosine
  modified_base 9: mod_base = OTHER; note = 2'-O-methyl guanosine
  modified_base 10: mod_base = OTHER; note = 2'-O-methyl uridine
  modified_base 11: mod_base = OTHER; note = 2'-O-methyl guanosine
  modified_base 13: mod_base = OTHER; note = 2'-O-methyl cytidine
  modified_base 18: mod_base = OTHER; note = 2'-O-methyl uridine
  modified_base 22: mod_base = OTHER; note = 2'-O-methyl uridine
  modified_base 25: mod_base = OTHER; note = 2'-O-methyl guanosine
  modified_base 27: mod_base = OTHER; note = 2'-O-methyl uridine
  modified_base 29: mod_base = OTHER; note = 2'-O-methyl uridine
  modified_base 30: mod_base = OTHER; note = 2'-O-methyl adenosine
  modified_base 31: mod_base = OTHER; note = 2'-O-methyl guanosine
  modified_base 32: mod_base = OTHER; note = 2'-O-methyl cytidine
  modified_base 38: mod_base = OTHER; note = 2'-O-methyl uridine
  modified_base 39: mod_base = OTHER; note = 2'-O-methyl uridine phosphorothioate
  modified_base 40: mod_base = OTHER; note = 2'-O-methyl cytidine phosphorothioate
  modified_base 41: mod_base = OTHER; note = 2'-O-methyl uridine phosphorothioate
  modified_base 42: mod_base = OTHER; note = 2'-O-methyl cytidine

SEQ ID NO: 145 - RNA, 42 nt, synthetic construct; identical to SEQ ID NO: 126
  source 1..42: mol_type = other RNA
  modified_base 1: mod_base = OTHER; note = 2'-O-methyl cytidine phosphorothioate
  modified_base 2: mod_base = OTHER; note = 2'-O-methyl uridine phosphorothioate
  modified_base 3: mod_base = OTHER; note = 2'-O-methyl guanosine phosphorothioate
  modified_base 4: mod_base = OTHER; note = 2'-O-methyl adenosine
  modified_base 5: mod_base = OTHER; note = 2'-O-methyl adenosine
  modified_base 9: mod_base = OTHER; note = 2'-O-methyl guanosine
  modified_base 10: mod_base = OTHER; note = 2'-O-methyl uridine
  modified_base 11: mod_base = OTHER; note = 2'-O-methyl guanosine
  modified_base 13: mod_base = OTHER; note = 2'-O-methyl cytidine
  modified_base 18: mod_base = OTHER; note = 2'-O-methyl uridine
  modified_base 22: mod_base = OTHER; note = 2'-O-methyl uridine
  modified_base 25: mod_base = OTHER; note = 2'-O-methyl guanosine
  modified_base 28: mod_base = OTHER; note = 2'-O-methyl guanosine
  modified_base 29: mod_base = OTHER; note = 2'-O-methyl uridine
  modified_base 30: mod_base = OTHER; note = 2'-O-methyl adenosine
  modified_base 31: mod_base = OTHER; note = 2'-O-methyl guanosine
  modified_base 32: mod_base = OTHER; note = 2'-O-methyl cytidine
  modified_base 38: mod_base = OTHER; note = 2'-O-methyl uridine
  modified_base 39: mod_base = OTHER; note = 2'-O-methyl uridine phosphorothioate
  modified_base 40: mod_base = OTHER; note = 2'-O-methyl cytidine phosphorothioate
  modified_base 41: mod_base = OTHER; note = 2'-O-methyl uridine phosphorothioate
  modified_base 42: mod_base = OTHER; note = 2'-O-methyl cytidine

SEQ ID NO: 146 - RNA, 42 nt, synthetic construct; identical to SEQ ID NO: 126
  source 1..42: mol_type = other RNA
  modified_base 1: mod_base = OTHER; note = 2'-O-methyl cytidine phosphorothioate
  modified_base 2: mod_base = OTHER; note = 2'-O-methyl uridine phosphorothioate
  modified_base 3: mod_base = OTHER; note = 2'-O-methyl guanosine phosphorothioate
  modified_base 4: mod_base = OTHER; note = 2'-O-methyl adenosine
  modified_base 5: mod_base = OTHER; note = 2'-O-methyl adenosine
  modified_base 9: mod_base = OTHER; note = 2'-O-methyl guanosine
  modified_base 10: mod_base = OTHER; note = 2'-O-methyl uridine
  modified_base 11: mod_base = OTHER; note = 2'-O-methyl guanosine
  modified_base 13: mod_base = OTHER; note = 2'-O-methyl cytidine
  modified_base 18: mod_base = OTHER; note = 2'-O-methyl uridine
  modified_base 22: mod_base = OTHER; note = 2'-O-methyl uridine
  modified_base 25: mod_base = OTHER; note = 2'-O-methyl guanosine
  modified_base 29: mod_base = OTHER; note = 2'-O-methyl uridine
  modified_base 30: mod_base = OTHER; note = 2'-O-methyl adenosine
  modified_base 31: mod_base = OTHER; note = 2'-O-methyl guanosine
  modified_base 32: mod_base = OTHER; note = 2'-O-methyl cytidine
  modified_base 33: mod_base = OTHER; note = 2'-O-methyl uridine
  modified_base 38: mod_base = OTHER; note = 2'-O-methyl uridine
  modified_base 39: mod_base = OTHER; note = 2'-O-methyl uridine phosphorothioate
  modified_base 40: mod_base = OTHER; note = 2'-O-methyl cytidine phosphorothioate
  modified_base 41: mod_base = OTHER; note = 2'-O-methyl uridine phosphorothioate
  modified_base 42: mod_base = OTHER; note = 2'-O-methyl cytidine

SEQ ID NO: 147 - RNA, 42 nt, synthetic construct; identical to SEQ ID NO: 126
  source 1..42: mol_type = other RNA
  modified_base 1: mod_base = OTHER; note = 2'-O-methyl cytidine phosphorothioate
  modified_base 2: mod_base = OTHER; note = 2'-O-methyl uridine phosphorothioate
  modified_base 3: mod_base = OTHER; note = 2'-O-methyl guanosine phosphorothioate
  modified_base 4: mod_base = OTHER; note = 2'-O-methyl adenosine
  modified_base 5: mod_base = OTHER; note = 2'-O-methyl adenosine
  modified_base 9: mod_base = OTHER; note = 2'-O-methyl guanosine
  modified_base 10: mod_base = OTHER; note = 2'-O-methyl uridine
  modified_base 11: mod_base = OTHER; note = 2'-O-methyl guanosine
  modified_base 13: mod_base = OTHER; note = 2'-O-methyl cytidine
  modified_base 18: mod_base = OTHER; note = 2'-O-methyl uridine
  modified_base 22: mod_base = OTHER; note = 2'-O-methyl uridine
  modified_base 25: mod_base = OTHER; note = 2'-O-methyl guanosine
  modified_base 29: mod_base = OTHER; note = 2'-O-methyl uridine
  modified_base 30: mod_base = OTHER; note = 2'-O-methyl adenosine
  modified_base 31: mod_base = OTHER; note = 2'-O-methyl guanosine
  modified_base 32: mod_base = OTHER; note = 2'-O-methyl cytidine
  modified_base 34: mod_base = OTHER; note = 2'-O-methyl cytidine
  modified_base 38: mod_base = OTHER; note = 2'-O-methyl uridine
  modified_base 39: mod_base = OTHER; note = 2'-O-methyl uridine phosphorothioate
  modified_base 40: mod_base = OTHER; note = 2'-O-methyl cytidine phosphorothioate
  modified_base 41: mod_base = OTHER; note = 2'-O-methyl uridine phosphorothioate
  modified_base 42: mod_base = OTHER; note = 2'-O-methyl cytidine

SEQ ID NO: 148 - RNA, 42 nt, synthetic construct; identical to SEQ ID NO: 126
  source 1..42: mol_type = other RNA
  modified_base 1: mod_base = OTHER; note = 2'-O-methyl cytidine phosphorothioate
  modified_base 2: mod_base = OTHER; note = 2'-O-methyl uridine phosphorothioate
  modified_base 3: mod_base = OTHER; note = 2'-O-methyl guanosine phosphorothioate
  modified_base 4: mod_base = OTHER; note = 2'-O-methyl adenosine
  modified_base 5: mod_base = OTHER; note = 2'-O-methyl adenosine
  modified_base 9: mod_base = OTHER; note = 2'-O-methyl guanosine
  modified_base 10: mod_base = OTHER; note = 2'-O-methyl uridine
  modified_base 11: mod_base = OTHER; note = 2'-O-methyl guanosine
  modified_base 13: mod_base = OTHER; note = 2'-O-methyl cytidine
  modified_base 18: mod_base = OTHER; note = 2'-O-methyl uridine
  modified_base 22: mod_base = OTHER; note = 2'-O-methyl uridine
  modified_base 25: mod_base = OTHER; note = 2'-O-methyl guanosine
  modified_base 29: mod_base = OTHER; note = 2'-O-methyl uridine
  modified_base 30: mod_base = OTHER; note = 2'-O-methyl adenosine
  modified_base 31: mod_base = OTHER; note = 2'-O-methyl guanosine
  modified_base 32: mod_base = OTHER; note = 2'-O-methyl cytidine
  modified_base 35: mod_base = OTHER; note = 2'-O-methyl cytidine
  modified_base 38: mod_base = OTHER; note = 2'-O-methyl uridine
  modified_base 39: mod_base = OTHER; note = 2'-O-methyl uridine phosphorothioate
  modified_base 40: mod_base = OTHER; note = 2'-O-methyl cytidine phosphorothioate
  modified_base 41: mod_base = OTHER; note = 2'-O-methyl uridine phosphorothioate
  modified_base 42: mod_base = OTHER; note = 2'-O-methyl cytidine

SEQ ID NO: 149 - RNA, 42 nt, synthetic construct; identical to SEQ ID NO: 126
  source 1..42: mol_type = other RNA
  modified_base 1: mod_base = OTHER; note = 2'-O-methyl cytidine phosphorothioate
  modified_base 2: mod_base = OTHER; note = 2'-O-methyl uridine phosphorothioate
  modified_base 3: mod_base = OTHER; note = 2'-O-methyl guanosine phosphorothioate
  modified_base 4: mod_base = OTHER; note = 2'-O-methyl adenosine
  modified_base 5: mod_base = OTHER; note = 2'-O-methyl adenosine
  modified_base 9: mod_base = OTHER; note = 2'-O-methyl guanosine
  modified_base 10: mod_base = OTHER; note = 2'-O-methyl uridine
  modified_base 11: mod_base = OTHER; note = 2'-O-methyl guanosine
  modified_base 13: mod_base = OTHER; note = 2'-O-methyl cytidine
  modified_base 18: mod_base = OTHER; note = 2'-O-methyl uridine
  modified_base 22: mod_base = OTHER; note = 2'-O-methyl uridine
  modified_base 25: mod_base = OTHER; note = 2'-O-methyl guanosine
  modified_base 29: mod_base = OTHER; note = 2'-O-methyl uridine
  modified_base 30: mod_base = OTHER; note = 2'-O-methyl adenosine
  modified_base 31: mod_base = OTHER; note = 2'-O-methyl guanosine
  modified_base 32: mod_base = OTHER; note = 2'-O-methyl cytidine
  modified_base 36: mod_base = OTHER; note = 2'-O-methyl cytidine
  modified_base 38: mod_base = OTHER; note = 2'-O-methyl uridine
  modified_base 39: mod_base = OTHER; note = 2'-O-methyl uridine phosphorothioate
  modified_base 40: mod_base = OTHER; note = 2'-O-methyl cytidine phosphorothioate
  modified_base 41: mod_base = OTHER; note = 2'-O-methyl uridine phosphorothioate
  modified_base 42: mod_base = OTHER; note = 2'-O-methyl cytidine

SEQ ID NO: 150 - RNA, 42 nt, synthetic construct; identical to SEQ ID NO: 126
  source 1..42: mol_type = other RNA
  modified_base 1: mod_base = OTHER; note = 2'-O-methyl cytidine phosphorothioate
  modified_base 2: mod_base = OTHER; note = 2'-O-methyl uridine phosphorothioate
  modified_base 3: mod_base = OTHER; note = 2'-O-methyl guanosine phosphorothioate
  modified_base 4: mod_base = OTHER; note = 2'-O-methyl adenosine
  modified_base 5: mod_base = OTHER; note = 2'-O-methyl adenosine
  modified_base 9: mod_base = OTHER; note = 2'-O-methyl guanosine
  modified_base 10: mod_base = OTHER; note = 2'-O-methyl uridine
  modified_base 11: mod_base = OTHER; note = 2'-O-methyl guanosine
  modified_base 13: mod_base = OTHER; note = 2'-O-methyl cytidine
  modified_base 18: mod_base = OTHER; note = 2'-O-methyl uridine
  modified_base 22: mod_base = OTHER; note = 2'-O-methyl uridine
  modified_base 25: mod_base = OTHER; note = 2'-O-methyl guanosine
  modified_base 29: mod_base = OTHER; note = 2'-O-methyl uridine
  modified_base 30: mod_base = OTHER; note = 2'-O-methyl adenosine
  modified_base 31: mod_base = OTHER; note = 2'-O-methyl guanosine
  modified_base 32: mod_base = OTHER; note = 2'-O-methyl cytidine
  modified_base 37: mod_base = OTHER; note = 2'-O-methyl uridine
  modified_base 38: mod_base = OTHER; note = 2'-O-methyl uridine
  modified_base 39: mod_base = OTHER; note = 2'-O-methyl uridine phosphorothioate
  modified_base 40: mod_base = OTHER; note = 2'-O-methyl cytidine phosphorothioate
  modified_base 41: mod_base = OTHER; note = 2'-O-methyl uridine phosphorothioate
  modified_base 42: mod_base = OTHER; note = 2'-O-methyl cytidine

SEQ ID NO: 151 - RNA, 42 nt, synthetic construct; identical to SEQ ID NO: 126
  source 1..42: mol_type = other RNA
  modified_base 1: mod_base = OTHER; note = 2'-O-methyl cytidine phosphorothioate
  modified_base 2: mod_base = OTHER; note = 2'-O-methyl uridine phosphorothioate
  modified_base 3: mod_base = OTHER; note = 2'-O-methyl guanosine phosphorothioate
  modified_base 4: mod_base = OTHER; note = 2'-O-methyl adenosine
  modified_base 5: mod_base = OTHER; note = 2'-O-methyl adenosine
  modified_base 6: mod_base = OTHER; note = 2'-fluoro cytidine
  modified_base 9: mod_base = OTHER; note = 2'-O-methyl guanosine
  modified_base 10: mod_base = OTHER; note = 2'-O-methyl uridine
  modified_base 11: mod_base = OTHER; note = 2'-O-methyl guanosine
  modified_base 13: mod_base = OTHER; note = 2'-O-methyl cytidine
  modified_base 18: mod_base = OTHER; note = 2'-O-methyl uridine
  modified_base 22: mod_base = OTHER; note = 2'-O-methyl uridine
  modified_base 25: mod_base = OTHER; note = 2'-O-methyl guanosine
  modified_base 29: mod_base = OTHER; note = 2'-O-methyl uridine
  modified_base 30: mod_base = OTHER; note = 2'-O-methyl adenosine
  modified_base 31: mod_base = OTHER; note = 2'-O-methyl guanosine
  modified_base 32: mod_base = OTHER; note = 2'-O-methyl cytidine
  modified_base 38: mod_base = OTHER; note = 2'-O-methyl uridine
  modified_base 39: mod_base = OTHER; note = 2'-O-methyl uridine phosphorothioate
  modified_base 40: mod_base = OTHER; note = 2'-O-methyl cytidine phosphorothioate
  modified_base 41: mod_base = OTHER; note = 2'-O-methyl uridine phosphorothioate
  modified_base 42: mod_base = OTHER; note = 2'-O-methyl cytidine

SEQ ID NO: 152 - RNA, 42 nt, synthetic construct; identical to SEQ ID NO: 126
  source 1..42: mol_type = other RNA
  modified_base 1: mod_base = OTHER; note = 2'-O-methyl cytidine phosphorothioate
  modified_base 2: mod_base = OTHER; note = 2'-O-methyl uridine phosphorothioate
  modified_base 3: mod_base = OTHER; note = 2'-O-methyl guanosine phosphorothioate
  modified_base 4: mod_base = OTHER; note = 2'-O-methyl adenosine
  modified_base 5: mod_base = OTHER; note = 2'-O-methyl adenosine
  modified_base 7: mod_base = OTHER; note = 2'-fluoro uridine
  modified_base 9: mod_base = OTHER; note = 2'-O-methyl guanosine
  modified_base 10: mod_base = OTHER; note = 2'-O-methyl uridine
  modified_base 11: mod_base = OTHER; note = 2'-O-methyl guanosine
  modified_base 13: mod_base = OTHER; note = 2'-O-methyl cytidine
  modified_base 18: mod_base = OTHER; note = 2'-O-methyl uridine
  modified_base 22: mod_base = OTHER; note = 2'-O-methyl uridine
  modified_base 25: mod_base = OTHER; note = 2'-O-methyl guanosine
  modified_base 29: mod_base = OTHER; note = 2'-O-methyl uridine
  modified_base 30: mod_base = OTHER; note = 2'-O-methyl adenosine
  modified_base 31: mod_base = OTHER; note = 2'-O-methyl guanosine
  modified_base 32: mod_base = OTHER; note = 2'-O-methyl cytidine
  modified_base 38: mod_base = OTHER; note = 2'-O-methyl uridine
  modified_base 39: mod_base = OTHER; note = 2'-O-methyl uridine phosphorothioate
  modified_base 40: mod_base = OTHER; note = 2'-O-methyl cytidine phosphorothioate
  modified_base 41: mod_base = OTHER; note = 2'-O-methyl uridine phosphorothioate
  modified_base 42: mod_base = OTHER; note = 2'-O-methyl cytidine

SEQ ID NO: 153 - RNA, 42 nt, synthetic construct; identical to SEQ ID NO: 126
  source 1..42: mol_type = other RNA
  modified_base 1: mod_base = OTHER; note = 2'-O-methyl cytidine phosphorothioate
  modified_base 2: mod_base = OTHER; note = 2'-O-methyl uridine phosphorothioate
  modified_base 3: mod_base = OTHER; note = 2'-O-methyl guanosine phosphorothioate
  modified_base 4: mod_base = OTHER; note = 2'-O-methyl adenosine
  modified_base 5: mod_base = OTHER; note = 2'-O-methyl adenosine
  modified_base 8: mod_base = OTHER; note = 2'-fluoro uridine
  modified_base 9: mod_base = OTHER; note = 2'-O-methyl guanosine
  modified_base 10: mod_base = OTHER; note = 2'-O-methyl uridine
  modified_base 11: mod_base = OTHER; note = 2'-O-methyl guanosine
  modified_base 13: mod_base = OTHER; note = 2'-O-methyl cytidine
  modified_base 18: mod_base = OTHER; note = 2'-O-methyl uridine
  modified_base 22: mod_base = OTHER; note = 2'-O-methyl uridine
  modified_base 25: mod_base = OTHER; note = 2'-O-methyl guanosine
  modified_base 29: mod_base = OTHER; note = 2'-O-methyl uridine
  modified_base 30: mod_base = OTHER; note = 2'-O-methyl adenosine
  modified_base 31: mod_base = OTHER; note = 2'-O-methyl guanosine
  modified_base 32: mod_base = OTHER; note = 2'-O-methyl cytidine
  modified_base 38: mod_base = OTHER; note = 2'-O-methyl uridine
  modified_base 39: mod_base = OTHER; note = 2'-O-methyl uridine phosphorothioate
  modified_base 40: mod_base = OTHER; note = 2'-O-methyl cytidine phosphorothioate
  modified_base 41: mod_base = OTHER; note = 2'-O-methyl uridine phosphorothioate
  modified_base 42: mod_base = OTHER; note = 2'-O-methyl cytidine

SEQ ID NO: 154 - RNA, 42 nt, synthetic construct; identical to SEQ ID NO: 126
  source 1..42: mol_type = other RNA
  modified_base 1: mod_base = OTHER; note = 2'-O-methyl cytidine phosphorothioate
  modified_base 2: mod_base = OTHER; note = 2'-O-methyl uridine phosphorothioate
  modified_base 3: mod_base = OTHER; note = 2'-O-methyl guanosine phosphorothioate
  modified_base 4: mod_base = OTHER; note = 2'-O-methyl adenosine
  modified_base 5: mod_base = OTHER; note = 2'-O-methyl adenosine
  modified_base 9: mod_base = OTHER; note = 2'-O-methyl guanosine
  modified_base 10: mod_base = OTHER; note = 2'-O-methyl uridine
  modified_base 11: mod_base = OTHER; note = 2'-O-methyl guanosine
  modified_base 12: mod_base = OTHER; note = 2'-fluoro guanosine
  modified_base 13: mod_base = OTHER; note = 2'-O-methyl cytidine
  modified_base 18: mod_base = OTHER; note = 2'-O-methyl uridine
  modified_base 22: mod_base = OTHER; note = 2'-O-methyl uridine
  modified_base 25: mod_base = OTHER; note = 2'-O-methyl guanosine
  modified_base 29: mod_base = OTHER; note = 2'-O-methyl uridine
  modified_base 30: mod_base = OTHER; note = 2'-O-methyl adenosine
  modified_base 31: mod_base = OTHER; note = 2'-O-methyl guanosine
  modified_base 32: mod_base = OTHER; note = 2'-O-methyl cytidine
  modified_base 38: mod_base = OTHER; note = 2'-O-methyl uridine
  modified_base 39: mod_base = OTHER; note = 2'-O-methyl uridine phosphorothioate
  modified_base 40: mod_base = OTHER; note = 2'-O-methyl cytidine phosphorothioate
  modified_base 41: mod_base = OTHER; note = 2'-O-methyl uridine phosphorothioate
  modified_base 42: mod_base = OTHER; note = 2'-O-methyl cytidine

SEQ ID NO: 155 - RNA, 42 nt, synthetic construct; identical to SEQ ID NO: 126
  source 1..42: mol_type = other RNA
  modified_base 1: mod_base = OTHER; note = 2'-O-methyl cytidine phosphorothioate
  modified_base 2: mod_base = OTHER; note = 2'-O-methyl uridine phosphorothioate
  modified_base 3: mod_base = OTHER; note = 2'-O-methyl guanosine phosphorothioate
  modified_base 4: mod_base = OTHER; note = 2'-O-methyl adenosine
  modified_base 5: mod_base = OTHER; note = 2'-O-methyl adenosine
  modified_base 9: mod_base = OTHER; note = 2'-O-methyl guanosine
  modified_base 10: mod_base = OTHER; note = 2'-O-methyl uridine
  modified_base 11: mod_base = OTHER; note = 2'-O-methyl guanosine
  modified_base 13: mod_base = OTHER; note = 2'-O-methyl cytidine
  modified_base 14: mod_base = OTHER; note = 2'-fluoro cytidine
  modified_base 18: mod_base = OTHER; note = 2'-O-methyl uridine
  modified_base 22: mod_base = OTHER; note = 2'-O-methyl uridine
  modified_base 25: mod_base = OTHER; note = 2'-O-methyl guanosine
  modified_base 29: mod_base = OTHER; note = 2'-O-methyl uridine
  modified_base 30: mod_base = OTHER; note = 2'-O-methyl adenosine
  modified_base 31: mod_base = OTHER; note = 2'-O-methyl guanosine
  modified_base 32: mod_base = OTHER; note = 2'-O-methyl cytidine
  modified_base 38: mod_base = OTHER; note = 2'-O-methyl uridine
  modified_base 39: mod_base = OTHER; note = 2'-O-methyl uridine phosphorothioate
  modified_base 40: mod_base = OTHER; note = 2'-O-methyl cytidine phosphorothioate
  modified_base 41: mod_base = OTHER; note = 2'-O-methyl uridine phosphorothioate
  modified_base 42: mod_base = OTHER; note = 2'-O-methyl cytidine

SEQ ID NO: 156 - RNA, 42 nt, synthetic construct; identical to SEQ ID NO: 126
  source 1..42: mol_type = other RNA
  modified_base 1: mod_base = OTHER; note = 2'-O-methyl cytidine phosphorothioate
  modified_base 2: mod_base = OTHER; note = 2'-O-methyl uridine phosphorothioate
  modified_base 3: mod_base = OTHER; note = 2'-O-methyl guanosine phosphorothioate
  modified_base 4: mod_base = OTHER; note = 2'-O-methyl adenosine
  modified_base 5: mod_base = OTHER; note = 2'-O-methyl adenosine
  modified_base 9: mod_base = OTHER; note = 2'-O-methyl guanosine
  modified_base 10: mod_base = OTHER; note = 2'-O-methyl uridine
  modified_base 11: mod_base = OTHER; note = 2'-O-methyl guanosine
  modified_base 13: mod_base = OTHER; note = 2'-O-methyl cytidine
  modified_base 15: mod_base = OTHER; note = 2'-fluoro guanosine
  modified_base 18: mod_base = OTHER; note = 2'-O-methyl uridine
  modified_base 22: mod_base = OTHER; note = 2'-O-methyl uridine
  modified_base 25: mod_base = OTHER; note = 2'-O-methyl guanosine
  modified_base 29: mod_base = OTHER; note = 2'-O-methyl uridine
  modified_base 30: mod_base = OTHER; note = 2'-O-methyl adenosine
  modified_base 31: mod_base = OTHER; note = 2'-O-methyl guanosine
  modified_base 32: mod_base = OTHER; note = 2'-O-methyl cytidine
  modified_base 38: mod_base = OTHER; note = 2'-O-methyl uridine
  modified_base 39: mod_base = OTHER; note = 2'-O-methyl uridine phosphorothioate
  modified_base 40: mod_base = OTHER; note = 2'-O-methyl cytidine phosphorothioate
  modified_base 41: mod_base = OTHER; note = 2'-O-methyl uridine phosphorothioate
  modified_base 42: mod_base = OTHER; note = 2'-O-methyl cytidine

SEQ ID NO: 157 - RNA, 42 nt, synthetic construct; identical to SEQ ID NO: 126
  source 1..42: mol_type = other RNA
  modified_base 1: mod_base = OTHER; note = 2'-O-methyl cytidine phosphorothioate
  modified_base 2: mod_base = OTHER; note = 2'-O-methyl uridine phosphorothioate
  modified_base 3: mod_base = OTHER; note = 2'-O-methyl guanosine phosphorothioate
  modified_base 4: mod_base = OTHER; note = 2'-O-methyl adenosine
  modified_base 5: mod_base = OTHER; note = 2'-O-methyl adenosine
  modified_base 9: mod_base = OTHER; note = 2'-O-methyl guanosine
  modified_base 10: mod_base = OTHER; note = 2'-O-methyl uridine
  modified_base 11: mod_base = OTHER; note = 2'-O-methyl guanosine
  modified_base 13: mod_base = OTHER; note = 2'-O-methyl cytidine
  modified_base 16: mod_base = OTHER; note = 2'-fluoro uridine
  modified_base 18: mod_base = OTHER; note = 2'-O-methyl uridine
  modified_base 22: mod_base = OTHER; note = 2'-O-methyl uridine
  modified_base 25: mod_base = OTHER; note = 2'-O-methyl guanosine
  modified_base 29: mod_base = OTHER; note = 2'-O-methyl uridine
  modified_base 30: mod_base = OTHER; note = 2'-O-methyl adenosine
  modified_base 31: mod_base = OTHER; note = 2'-O-methyl guanosine
  modified_base 32: mod_base = OTHER; note = 2'-O-methyl cytidine
  modified_base 38: mod_base = OTHER; note = 2'-O-methyl uridine
  modified_base 39: mod_base = OTHER; note = 2'-O-methyl uridine phosphorothioate
  modified_base 40: mod_base = OTHER; note = 2'-O-methyl cytidine phosphorothioate
  modified_base 41: mod_base = OTHER; note = 2'-O-methyl uridine phosphorothioate
  modified_base 42: mod_base = OTHER; note = 2'-O-methyl cytidine

SEQ ID NO: 158 - RNA, 42 nt, synthetic construct; identical to SEQ ID NO: 126
  source 1..42: mol_type = other RNA
  modified_base 1: mod_base = OTHER; note = 2'-O-methyl cytidine phosphorothioate
  modified_base 2: mod_base = OTHER; note = 2'-O-methyl uridine phosphorothioate
  modified_base 3: mod_base = OTHER; note = 2'-O-methyl guanosine phosphorothioate
  modified_base 4: mod_base = OTHER; note = 2'-O-methyl adenosine
  modified_base 5: mod_base = OTHER; note = 2'-O-methyl adenosine
  modified_base 9: mod_base = OTHER; note = 2'-O-methyl guanosine
  modified_base 10: mod_base = OTHER; note = 2'-O-methyl uridine
  modified_base 11: mod_base = OTHER; note = 2'-O-methyl guanosine
  modified_base 13: mod_base = OTHER; note = 2'-O-methyl cytidine
  modified_base 17: mod_base = OTHER; note = 2'-fluoro uridine
  modified_base 18: mod_base = OTHER; note = 2'-O-methyl uridine
  modified_base 22: mod_base = OTHER; note = 2'-O-methyl uridine
  modified_base 25: mod_base = OTHER; note = 2'-O-methyl guanosine
  modified_base 29: mod_base = OTHER; note = 2'-O-methyl uridine
  modified_base 30: mod_base = OTHER; note = 2'-O-methyl adenosine
  modified_base 31: mod_base = OTHER; note = 2'-O-methyl guanosine
  modified_base 32: mod_base = OTHER; note = 2'-O-methyl cytidine
  modified_base 38: mod_base = OTHER; note = 2'-O-methyl uridine
  modified_base 39: mod_base = OTHER; note = 2'-O-methyl uridine phosphorothioate
  modified_base 40: mod_base = OTHER; note = 2'-O-methyl cytidine phosphorothioate
  modified_base 41: mod_base = OTHER; note = 2'-O-methyl uridine phosphorothioate
  modified_base 42: mod_base = OTHER; note = 2'-O-methyl cytidine

SEQ ID NO: 159 - RNA, 42 nt, synthetic construct; identical to SEQ ID NO: 126
  source 1..42: mol_type = other RNA
  modified_base 1: mod_base = OTHER; note = 2'-O-methyl cytidine phosphorothioate
  modified_base 2: mod_base = OTHER; note = 2'-O-methyl uridine phosphorothioate
  modified_base 3: mod_base = OTHER; note = 2'-O-methyl guanosine phosphorothioate
  modified_base 4: mod_base = OTHER; note = 2'-O-methyl adenosine
  modified_base 5: mod_base = OTHER; note = 2'-O-methyl adenosine
  modified_base 9: mod_base = OTHER; note = 2'-O-methyl guanosine
  modified_base 10: mod_base = OTHER; note = 2'-O-methyl uridine
  modified_base 11: mod_base = OTHER; note = 2'-O-methyl guanosine
  modified_base 13: mod_base = OTHER; note = 2'-O-methyl cytidine
  modified_base 18: mod_base = OTHER; note = 2'-O-methyl uridine
  modified_base 19: mod_base = OTHER; note = 2'-fluoro adenosine
  modified_base 22: mod_base = OTHER; note = 2'-O-methyl uridine
  modified_base 25: mod_base = OTHER; note = 2'-O-methyl guanosine
  modified_base 29: mod_base = OTHER; note = 2'-O-methyl uridine
  modified_base 30: mod_base = OTHER; note = 2'-O-methyl adenosine
  modified_base 31: mod_base = OTHER; note = 2'-O-methyl guanosine
  modified_base 32: mod_base = OTHER; note = 2'-O-methyl cytidine
  modified_base 38: mod_base = OTHER; note = 2'-O-methyl uridine
  modified_base 39: mod_base = OTHER; note = 2'-O-methyl uridine phosphorothioate
  modified_base 40: mod_base = OTHER; note = 2'-O-methyl cytidine phosphorothioate
  modified_base 41: mod_base = OTHER; note = 2'-O-methyl uridine phosphorothioate
  modified_base 42: mod_base = OTHER; note = 2'-O-methyl cytidine

SEQ ID NO: 160 - RNA, 42 nt, synthetic construct; identical to SEQ ID NO: 126
  source 1..42: mol_type = other RNA
  modified_base 1: mod_base = OTHER; note = 2'-O-methyl cytidine phosphorothioate
  modified_base 2: mod_base = OTHER; note = 2'-O-methyl uridine phosphorothioate
  modified_base 3: mod_base = OTHER; note = 2'-O-methyl guanosine phosphorothioate
  modified_base 4: mod_base = OTHER; note = 2'-O-methyl adenosine
  modified_base 5: mod_base = OTHER; note = 2'-O-methyl adenosine
  modified_base 9: mod_base = OTHER; note = 2'-O-methyl guanosine
  modified_base 10: mod_base = OTHER; note = 2'-O-methyl uridine
  modified_base 11: mod_base = OTHER; note = 2'-O-methyl guanosine
  modified_base 13: mod_base = OTHER; note = 2'-O-methyl cytidine
  modified_base 18: mod_base = OTHER; note = 2'-O-methyl uridine
  modified_base 20: mod_base = OTHER; note = 2'-fluoro cytidine
  modified_base 22: mod_base = OTHER; note = 2'-O-methyl uridine
  modified_base 25: mod_base = OTHER; note = 2'-O-methyl guanosine
  modified_base 29: mod_base = OTHER; note = 2'-O-methyl uridine
  modified_base 30: mod_base = OTHER; note = 2'-O-methyl adenosine
  modified_base 31: mod_base = OTHER; note = 2'-O-methyl guanosine
  modified_base 32: mod_base = OTHER; note = 2'-O-methyl cytidine
  modified_base 38: mod_base = OTHER; note = 2'-O-methyl uridine
  modified_base 39: mod_base = OTHER; note = 2'-O-methyl uridine phosphorothioate
  modified_base 40: mod_base = OTHER; note = 2'-O-methyl cytidine phosphorothioate
  modified_base 41: mod_base = OTHER; note = 2'-O-methyl uridine phosphorothioate
  modified_base 42: mod_base = OTHER; note = 2'-O-methyl cytidine

SEQ ID NO: 161 - RNA, 42 nt, synthetic construct; identical to SEQ ID NO: 126
  source 1..42: mol_type = other RNA
  modified_base 1: mod_base = OTHER; note = 2'-O-methyl cytidine phosphorothioate
  modified_base 2: mod_base = OTHER; note = 2'-O-methyl uridine phosphorothioate
  modified_base 3: mod_base = OTHER; note = 2'-O-methyl guanosine phosphorothioate
  modified_base 4: mod_base = OTHER; note = 2'-O-methyl adenosine
  modified_base 5: mod_base = OTHER; note = 2'-O-methyl adenosine
  modified_base 9: mod_base = OTHER; note = 2'-O-methyl guanosine
  modified_base 10: mod_base = OTHER; note = 2'-O-methyl uridine
  modified_base 11: mod_base = OTHER; note = 2'-O-methyl guanosine
  modified_base 13: mod_base = OTHER; note = 2'-O-methyl cytidine
  modified_base 18: mod_base = OTHER; note = 2'-O-methyl uridine
  modified_base 21: mod_base = OTHER; note = 2'-fluoro guanosine
  modified_base 22: mod_base = OTHER; note = 2'-O-methyl uridine
  modified_base 25: mod_base = OTHER; note = 2'-O-methyl guanosine
  modified_base 29: mod_base = OTHER; note = 2'-O-methyl uridine
  modified_base 30: mod_base = OTHER; note = 2'-O-methyl adenosine
  modified_base 31: mod_base = OTHER; note = 2'-O-methyl guanosine
  modified_base 32: mod_base = OTHER; note = 2'-O-methyl cytidine
  modified_base 38: mod_base = OTHER; note = 2'-O-methyl uridine
  modified_base 39: mod_base = OTHER; note = 2'-O-methyl uridine phosphorothioate
  modified_base 40: mod_base = OTHER; note = 2'-O-methyl cytidine phosphorothioate
  modified_base 41: mod_base = OTHER; note = 2'-O-methyl uridine phosphorothioate
  modified_base 42: mod_base = OTHER; note = 2'-O-methyl cytidine

SEQ ID NO: 162 - RNA, 42 nt, synthetic construct; identical to SEQ ID NO: 126
  source 1..42: mol_type = other RNA
  modified_base 1: mod_base = OTHER; note = 2'-O-methyl cytidine phosphorothioate
  modified_base 2: mod_base = OTHER; note = 2'-O-methyl uridine phosphorothioate
  modified_base 3: mod_base = OTHER; note = 2'-O-methyl guanosine phosphorothioate
  modified_base 4: mod_base = OTHER; note = 2'-O-methyl adenosine
  modified_base 5: mod_base = OTHER; note = 2'-O-methyl adenosine
  modified_base 9: mod_base = OTHER; note = 2'-O-methyl guanosine
  modified_base 10: mod_base = OTHER; note = 2'-O-methyl uridine
  modified_base 11: mod_base = OTHER; note = 2'-O-methyl guanosine
  modified_base 13: mod_base = OTHER; note = 2'-O-methyl cytidine
  modified_base 18: mod_base = OTHER; note = 2'-O-methyl uridine
  modified_base 22: mod_base = OTHER; note = 2'-O-methyl uridine
  modified_base 23: mod_base = OTHER; note = 2'-fluoro cytidine
  modified_base 25: mod_base = OTHER; note = 2'-O-methyl guanosine
  modified_base 29: mod_base = OTHER; note = 2'-O-methyl uridine
  modified_base 30: mod_base = OTHER; note = 2'-O-methyl adenosine
  modified_base 31: mod_base = OTHER; note = 2'-O-methyl guanosine
  modified_base 32: mod_base = OTHER; note = 2'-O-methyl cytidine
  modified_base 38: mod_base = OTHER; note = 2'-O-methyl uridine
  modified_base 39: mod_base = OTHER; note = 2'-O-methyl uridine phosphorothioate
  modified_base 40: mod_base = OTHER; note = 2'-O-methyl cytidine phosphorothioate
  modified_base 41: mod_base = OTHER; note = 2'-O-methyl uridine phosphorothioate
  modified_base 42: mod_base = OTHER; note = 2'-O-methyl cytidine

SEQ ID NO: 163 - RNA, 42 nt, synthetic construct; identical to SEQ ID NO: 126
  source 1..42: mol_type = other RNA
  modified_base 1: mod_base = OTHER; note = 2'-O-methyl cytidine phosphorothioate
  modified_base 2: mod_base = OTHER; note = 2'-O-methyl uridine phosphorothioate
  modified_base 3: mod_base = OTHER; note = 2'-O-methyl guanosine phosphorothioate
  modified_base 4: mod_base = OTHER; note = 2'-O-methyl adenosine
  modified_base 5: mod_base = OTHER; note = 2'-O-methyl adenosine
  modified_base 9: mod_base = OTHER; note = 2'-O-methyl guanosine
  modified_base 10: mod_base = OTHER; note = 2'-O-methyl uridine
  modified_base 11: mod_base = OTHER; note = 2'-O-methyl guanosine
  modified_base 13: mod_base = OTHER; note = 2'-O-methyl cytidine
  modified_base 18: mod_base = OTHER; note = 2'-O-methyl uridine
  modified_base 22: mod_base = OTHER; note = 2'-O-methyl uridine
  modified_base 24: mod_base = OTHER; note = 2'-fluoro guanosine
  modified_base 25: mod_base = OTHER; note = 2'-O-methyl guanosine
  modified_base 29: mod_base = OTHER; note = 2'-O-methyl uridine
  modified_base 30: mod_base = OTHER; note = 2'-O-methyl adenosine
  modified_base 31: mod_base = OTHER; note = 2'-O-methyl guanosine
  modified_base 32: mod_base = OTHER; note = 2'-O-methyl cytidine
  modified_base 38: mod_base = OTHER; note = 2'-O-methyl uridine
  modified_base 39: mod_base = OTHER; note = 2'-O-methyl uridine phosphorothioate
  modified_base 40: mod_base = OTHER; note = 2'-O-methyl cytidine phosphorothioate
  modified_base 41: mod_base = OTHER; note = 2'-O-methyl uridine phosphorothioate
  modified_base 42: mod_base = OTHER; note = 2'-O-methyl cytidine

SEQ ID NO: 164 - RNA, 42 nt, synthetic construct; identical to SEQ ID NO: 126
  source 1..42: mol_type = other RNA
  modified_base 1: mod_base = OTHER; note = 2'-O-methyl cytidine phosphorothioate
  modified_base 2: mod_base = OTHER; note = 2'-O-methyl uridine phosphorothioate
  modified_base 3: mod_base = OTHER; note = 2'-O-methyl guanosine phosphorothioate
  modified_base 4: mod_base = OTHER; note = 2'-O-methyl adenosine
  modified_base 5: mod_base = OTHER; note = 2'-O-methyl adenosine
  modified_base 9: mod_base = OTHER; note = 2'-O-methyl guanosine
  modified_base 10: mod_base = OTHER; note = 2'-O-methyl uridine
  modified_base 11: mod_base = OTHER; note = 2'-O-methyl guanosine
  modified_base 13: mod_base = OTHER; note = 2'-O-methyl cytidine
  modified_base 18: mod_base = OTHER; note = 2'-O-methyl uridine
  modified_base 22: mod_base = OTHER; note = 2'-O-methyl uridine
  modified_base 25: mod_base = OTHER; note = 2'-O-methyl guanosine
  modified_base 26: mod_base = OTHER; note = 2'-fluoro uridine
  modified_base 29: mod_base = OTHER; note = 2'-O-methyl uridine
  modified_base 30: mod_base = OTHER; note = 2'-O-methyl adenosine
  modified_base 31: mod_base = OTHER; note = 2'-O-methyl guanosine
  modified_base 32: mod_base = OTHER; note = 2'-O-methyl cytidine
  modified_base 38: mod_base = OTHER; note = 2'-O-methyl uridine
  modified_base 39: mod_base = OTHER; note = 2'-O-methyl uridine phosphorothioate
  modified_base 40: mod_base = OTHER; note = 2'-O-methyl cytidine phosphorothioate
  modified_base 41: mod_base = OTHER; note = 2'-O-methyl uridine phosphorothioate
  modified_base 42: mod_base = OTHER; note = 2'-O-methyl cytidine

SEQ ID NO: 165 - RNA, 42 nt, synthetic construct; identical to SEQ ID NO: 126
  source 1..42: mol_type = other RNA
  modified_base 1: mod_base = OTHER; note = 2'-O-methyl cytidine phosphorothioate
  modified_base 2: mod_base = OTHER; note = 2'-O-methyl uridine phosphorothioate
  modified_base 3: mod_base = OTHER; note = 2'-O-methyl guanosine phosphorothioate
  modified_base 4: mod_base = OTHER; note = 2'-O-methyl adenosine
  modified_base 5: mod_base = OTHER; note = 2'-O-methyl adenosine
  modified_base 9: mod_base = OTHER; note = 2'-O-methyl guanosine
  modified_base 10: mod_base = OTHER; note = 2'-O-methyl uridine
  modified_base 11: mod_base = OTHER; note = 2'-O-methyl guanosine
  modified_base 13: mod_base = OTHER; note = 2'-O-methyl cytidine
  modified_base 18: mod_base = OTHER; note = 2'-O-methyl uridine
  modified_base 22: mod_base = OTHER; note = 2'-O-methyl uridine
  modified_base 25: mod_base = OTHER; note = 2'-O-methyl guanosine
  modified_base 27: mod_base = OTHER; note = 2'-fluoro uridine
  modified_base 29: mod_base = OTHER; note = 2'-O-methyl uridine
  modified_base 30: mod_base = OTHER; note = 2'-O-methyl adenosine
  modified_base 31: mod_base = OTHER; note = 2'-O-methyl guanosine
  modified_base 32: mod_base = OTHER; note = 2'-O-methyl cytidine
  modified_base 38: mod_base = OTHER; note = 2'-O-methyl uridine
  modified_base 39: mod_base = OTHER; note = 2'-O-methyl uridine phosphorothioate
  modified_base 40: mod_base = OTHER; note = 2'-O-methyl cytidine phosphorothioate
  modified_base 41: mod_base = OTHER; note = 2'-O-methyl uridine phosphorothioate
  modified_base 42: mod_base = OTHER; note = 2'-O-methyl cytidine

SEQ ID NO: 166 - RNA, 42 nt, synthetic construct; identical to SEQ ID NO: 126
  source 1..42: mol_type = other RNA
  modified_base 1: mod_base = OTHER; note = 2'-O-methyl cytidine phosphorothioate
  modified_base 2: mod_base = OTHER; note = 2'-O-methyl uridine phosphorothioate
  modified_base 3: mod_base = OTHER; note = 2'-O-methyl guanosine phosphorothioate
  modified_base 4: mod_base = OTHER; note = 2'-O-methyl adenosine
  modified_base 5: mod_base = OTHER; note = 2'-O-methyl adenosine
  modified_base 9: mod_base = OTHER; note = 2'-O-methyl guanosine
  modified_base 10: mod_base = OTHER; note = 2'-O-methyl uridine
  modified_base 11: mod_base = OTHER; note = 2'-O-methyl guanosine
  modified_base 13: mod_base = OTHER; note = 2'-O-methyl cytidine
  modified_base 18: mod_base = OTHER; note = 2'-O-methyl uridine
  modified_base 22: mod_base = OTHER; note = 2'-O-methyl uridine
  modified_base 25: mod_base = OTHER; note = 2'-O-methyl guanosine
  modified_base 28: mod_base = OTHER; note = 2'-fluoro guanosine
  modified_base 29: mod_base = OTHER; note = 2'-O-methyl uridine
  modified_base 30: mod_base = OTHER; note = 2'-O-methyl adenosine
  modified_base 31: mod_base = OTHER; note = 2'-O-methyl guanosine
  modified_base 32: mod_base = OTHER; note = 2'-O-methyl cytidine
  modified_base 38: mod_base = OTHER; note = 2'-O-methyl uridine
  modified_base 39: mod_base = OTHER; note = 2'-O-methyl uridine phosphorothioate
  modified_base 40: mod_base = OTHER; note = 2'-O-methyl cytidine phosphorothioate
  modified_base 41: mod_base = OTHER; note = 2'-O-methyl uridine phosphorothioate
  modified_base 42: mod_base = OTHER; note = 2'-O-methyl cytidine

SEQ ID NO: 167 - RNA, 42 nt, synthetic construct; identical to SEQ ID NO: 126
  source 1..42: mol_type = other RNA
  modified_base 1: mod_base = OTHER; note = 2'-O-methyl cytidine phosphorothioate
  modified_base 2: mod_base = OTHER; note = 2'-O-methyl uridine phosphorothioate
  modified_base 3: mod_base = OTHER; note = 2'-O-methyl guanosine phosphorothioate
  modified_base 4: mod_base = OTHER; note = 2'-O-methyl adenosine
  modified_base 5: mod_base = OTHER; note = 2'-O-methyl adenosine
  modified_base 9: mod_base = OTHER; note = 2'-O-methyl guanosine
  modified_base 10: mod_base = OTHER; note = 2'-O-methyl uridine
  modified_base 11: mod_base = OTHER; note = 2'-O-methyl guanosine
  modified_base 13: mod_base = OTHER; note = 2'-O-methyl cytidine
  modified_base 18: mod_base = OTHER; note = 2'-O-methyl uridine
  modified_base 22: mod_base = OTHER; note = 2'-O-methyl uridine
  modified_base 25: mod_base = OTHER; note = 2'-O-methyl guanosine
  modified_base 29: mod_base = OTHER; note = 2'-O-methyl uridine
  modified_base 30: mod_base = OTHER; note = 2'-O-methyl adenosine
  modified_base 31: mod_base = OTHER; note = 2'-O-methyl guanosine
  modified_base 32: mod_base = OTHER; note = 2'-O-methyl cytidine
  modified_base 33: mod_base = OTHER; note = 2'-fluoro uridine
  modified_base 38: mod_base = OTHER; note = 2'-O-methyl uridine
  modified_base 39: mod_base = OTHER; note = 2'-O-methyl uridine phosphorothioate
  modified_base 40: mod_base = OTHER; note = 2'-O-methyl cytidine phosphorothioate
  modified_base 41: mod_base = OTHER; note = 2'-O-methyl uridine phosphorothioate
  modified_base 42: mod_base = OTHER; note = 2'-O-methyl cytidine

SEQ ID NO: 168 - RNA, 42 nt, synthetic construct; identical to SEQ ID NO: 126
  source 1..42: mol_type = other RNA
  modified_base 1: mod_base = OTHER; note = 2'-O-methyl cytidine phosphorothioate
  modified_base 2: mod_base = OTHER; note = 2'-O-methyl uridine phosphorothioate
  modified_base 3: mod_base = OTHER; note = 2'-O-methyl guanosine phosphorothioate
  modified_base 4: mod_base = OTHER; note = 2'-O-methyl adenosine
  modified_base 5: mod_base = OTHER; note = 2'-O-methyl adenosine
  modified_base 9: mod_base = OTHER; note = 2'-O-methyl guanosine
  modified_base 10: mod_base = OTHER; note = 2'-O-methyl uridine
  modified_base 11: mod_base = OTHER; note = 2'-O-methyl guanosine
  modified_base 13: mod_base = OTHER; note = 2'-O-methyl cytidine
  modified_base 18: mod_base = OTHER; note = 2'-O-methyl uridine
  modified_base 22: mod_base = OTHER; note = 2'-O-methyl uridine
  modified_base 25: mod_base = OTHER; note = 2'-O-methyl guanosine
  modified_base 29: mod_base = OTHER; note = 2'-O-methyl uridine
  modified_base 30: mod_base = OTHER; note = 2'-O-methyl adenosine
  modified_base 31: mod_base = OTHER; note = 2'-O-methyl guanosine
  modified_base 32: mod_base = OTHER; note = 2'-O-methyl cytidine
  modified_base 34: mod_base = OTHER; note = 2'-fluoro cytidine
  modified_base 38: mod_base = OTHER; note = 2'-O-methyl uridine
  modified_base 39: mod_base = OTHER; note = 2'-O-methyl uridine phosphorothioate
  modified_base 40: mod_base = OTHER; note = 2'-O-methyl cytidine phosphorothioate
  modified_base 41: mod_base = OTHER; note = 2'-O-methyl uridine phosphorothioate
  modified_base 42: mod_base = OTHER; note = 2'-O-methyl cytidine

SEQ ID NO: 169 - RNA, 42 nt, synthetic construct; identical to SEQ ID NO: 126
  source 1..42: mol_type = other RNA
  modified_base 1: mod_base = OTHER; note = 2'-O-methyl cytidine phosphorothioate
  modified_base 2: mod_base = OTHER; note = 2'-O-methyl uridine phosphorothioate
  modified_base 3: mod_base = OTHER; note = 2'-O-methyl guanosine phosphorothioate
  modified_base 4: mod_base = OTHER; note = 2'-O-methyl adenosine
  modified_base 5: mod_base = OTHER; note = 2'-O-methyl adenosine
  modified_base 9: mod_base = OTHER; note = 2'-O-methyl guanosine
  modified_base 10: mod_base = OTHER; note = 2'-O-methyl uridine
  modified_base 11: mod_base = OTHER; note = 2'-O-methyl guanosine
  modified_base 13: mod_base = OTHER; note = 2'-O-methyl cytidine
  modified_base 18: mod_base = OTHER; note = 2'-O-methyl uridine
  modified_base 22: mod_base = OTHER; note = 2'-O-methyl uridine
  modified_base 25: mod_base = OTHER; note = 2'-O-methyl guanosine
  modified_base 29: mod_base = OTHER; note = 2'-O-methyl uridine
  modified_base 30: mod_base = OTHER; note = 2'-O-methyl adenosine
  modified_base 31: mod_base = OTHER; note = 2'-O-methyl guanosine
  modified_base 32: mod_base = OTHER; note = 2'-O-methyl cytidine
  modified_base 35: mod_base = OTHER; note = 2'-fluoro cytidine
  modified_base 38: mod_base = OTHER; note = 2'-O-methyl uridine
  modified_base 39: mod_base = OTHER; note = 2'-O-methyl uridine phosphorothioate
  modified_base 40: mod_base = OTHER; note = 2'-O-methyl cytidine phosphorothioate
  modified_base 41: mod_base = OTHER; note = 2'-O-methyl uridine phosphorothioate
  modified_base 42: mod_base = OTHER; note = 2'-O-methyl cytidine

SEQ ID NO: 170 - RNA, 42 nt, synthetic construct; identical to SEQ ID NO: 126
  source 1..42: mol_type = other RNA
  modified_base 1: mod_base = OTHER; note = 2'-O-methyl cytidine phosphorothioate
  modified_base 2: mod_base = OTHER; note = 2'-O-methyl uridine phosphorothioate
  modified_base 3: mod_base = OTHER; note = 2'-O-methyl guanosine phosphorothioate
  modified_base 4: mod_base = OTHER; note = 2'-O-methyl adenosine
  modified_base 5: mod_base = OTHER; note = 2'-O-methyl adenosine
  modified_base 9: mod_base = OTHER; note = 2'-O-methyl guanosine
  modified_base 10: mod_base = OTHER; note = 2'-O-methyl uridine
  modified_base 11: mod_base = OTHER; note = 2'-O-methyl guanosine
  modified_base 13: mod_base = OTHER; note = 2'-O-methyl cytidine
  modified_base 18: mod_base = OTHER; note = 2'-O-methyl uridine
  modified_base 22: mod_base = OTHER; note = 2'-O-methyl uridine
  modified_base 25: mod_base = OTHER; note = 2'-O-methyl guanosine
  modified_base 29: mod_base = OTHER; note = 2'-O-methyl uridine
  modified_base 30: mod_base = OTHER; note = 2'-O-methyl adenosine
  modified_base 31: mod_base = OTHER; note = 2'-O-methyl guanosine
  modified_base 32: mod_base = OTHER; note = 2'-O-methyl cytidine
  modified_base 36: mod_base = OTHER; note = 2'-fluoro cytidine
  modified_base 38: mod_base = OTHER; note = 2'-O-methyl uridine
  modified_base 39: mod_base = OTHER; note = 2'-O-methyl uridine phosphorothioate
  modified_base 40: mod_base = OTHER; note = 2'-O-methyl cytidine phosphorothioate
  modified_base 41: mod_base = OTHER; note = 2'-O-methyl uridine phosphorothioate
  modified_base 42: mod_base = OTHER; note = 2'-O-methyl cytidine

SEQ ID NO: 171 - RNA, 42 nt, synthetic construct; identical to SEQ ID NO: 126
  source 1..42: mol_type = other RNA
  modified_base 1: mod_base = OTHER; note = 2'-O-methyl cytidine phosphorothioate
  modified_base 2: mod_base = OTHER; note = 2'-O-methyl uridine phosphorothioate
  modified_base 3: mod_base = OTHER; note = 2'-O-methyl guanosine phosphorothioate
  modified_base 4: mod_base = OTHER; note = 2'-O-methyl adenosine
  modified_base 5: mod_base = OTHER; note = 2'-O-methyl adenosine
  modified_base 9: mod_base = OTHER; note = 2'-O-methyl guanosine
  modified_base 10: mod_base = OTHER; note = 2'-O-methyl uridine
  modified_base 11: mod_base = OTHER; note = 2'-O-methyl guanosine
  modified_base 13: mod_base = OTHER; note = 2'-O-methyl cytidine
  modified_base 18: mod_base = OTHER; note = 2'-O-methyl uridine
  modified_base 22: mod_base = OTHER; note = 2'-O-methyl uridine
  modified_base 25: mod_base = OTHER; note = 2'-O-methyl guanosine
  modified_base 29: mod_base = OTHER; note = 2'-O-methyl uridine
  modified_base 30: mod_base = OTHER; note = 2'-O-methyl adenosine
  modified_base 31: mod_base = OTHER; note = 2'-O-methyl guanosine
  modified_base 32: mod_base = OTHER; note = 2'-O-methyl cytidine
  modified_base 37: mod_base = OTHER; note = 2'-fluoro uridine
  modified_base 38: mod_base = OTHER; note = 2'-O-methyl uridine
  modified_base 39: mod_base = OTHER; note = 2'-O-methyl uridine phosphorothioate
  modified_base 40: mod_base = OTHER; note = 2'-O-methyl cytidine phosphorothioate
  modified_base 41: mod_base = OTHER; note = 2'-O-methyl uridine phosphorothioate
  modified_base 42: mod_base = OTHER; note = 2'-O-methyl cytidine

SEQ ID NO: 172 - RNA, 42 nt, synthetic construct; identical to SEQ ID NO: 126
  source 1..42: mol_type = other RNA
  modified_base 1: mod_base = OTHER; note = 2'-O-methyl cytidine phosphorothioate
  modified_base 2: mod_base = OTHER; note = 2'-O-methyl uridine phosphorothioate
  modified_base 3: mod_base = OTHER; note = 2'-O-methyl guanosine phosphorothioate
  modified_base 4: mod_base = OTHER; note = 2'-O-methyl adenosine
  modified_base 5: mod_base = OTHER; note = 2'-O-methyl adenosine
  modified_base 6: mod_base = OTHER; note = 2'-O-methyl cytidine
  modified_base 7: mod_base = OTHER; note = 2'-O-methyl uridine
  modified_base 8: mod_base = OTHER; note = 2'-O-methyl uridine
  modified_base 9: mod_base = OTHER; note = 2'-O-methyl guanosine
  modified_base 10: mod_base = OTHER; note = 2'-O-methyl uridine
  modified_base 11: mod_base = OTHER; note = 2'-O-methyl guanosine
  modified_base 12: mod_base = OTHER; note = 2'-O-methyl guanosine
  modified_base 13: mod_base = OTHER; note = 2'-O-methyl cytidine
  modified_base 14: mod_base = OTHER; note = 2'-O-methyl cytidine
  modified_base 18: mod_base = OTHER; note = 2'-O-methyl uridine
  modified_base 22: mod_base = OTHER; note = 2'-O-methyl uridine
  modified_base 25: mod_base = OTHER; note = 2'-O-methyl guanosine
  modified_base 29: mod_base = OTHER; note = 2'-O-methyl uridine
  modified_base 30: mod_base = OTHER; note = 2'-O-methyl adenosine
  modified_base 31: mod_base = OTHER; note = 2'-O-methyl guanosine
  modified_base 32: mod_base = OTHER; note = 2'-O-methyl cytidine
  modified_base 38: mod_base = OTHER; note = 2'-O-methyl uridine
  modified_base 39: mod_base = OTHER; note = 2'-O-methyl uridine phosphorothioate
  modified_base 40: mod_base = OTHER; note = 2'-O-methyl cytidine phosphorothioate
  modified_base 41: mod_base = OTHER; note = 2'-O-methyl uridine phosphorothioate
  modified_base 42: mod_base = OTHER; note = 2'-O-methyl cytidine

SEQ ID NO: 173 - RNA, 42 nt, synthetic construct; identical to SEQ ID NO: 126
  source 1..42: mol_type = other RNA
  modified_base 1: mod_base = OTHER; note = 2'-O-methyl cytidine phosphorothioate
  modified_base 2: mod_base = OTHER; note = 2'-O-methyl uridine phosphorothioate
  modified_base 3: mod_base = OTHER; note = 2'-O-methyl guanosine phosphorothioate
  modified_base 4: mod_base = OTHER; note = 2'-O-methyl adenosine
  modified_base 5: mod_base = OTHER; note = 2'-O-methyl adenosine
  modified_base 6: mod_base = OTHER; note = 2'-fluoro cytidine
  modified_base 7: mod_base = OTHER; note = 2'-fluoro uridine
  modified_base 8: mod_base = OTHER; note = 2'-fluoro uridine
  modified_base 9: mod_base = OTHER; note = 2'-O-methyl guanosine
  modified_base 10: mod_base = OTHER; note = 2'-O-methyl uridine
  modified_base 11: mod_base = OTHER; note = 2'-O-methyl guanosine
  modified_base 12: mod_base = OTHER; note = 2'-O-methyl guanosine
  modified_base 13: mod_base = OTHER; note = 2'-O-methyl cytidine
  modified_base 14: mod_base = OTHER; note = 2'-O-methyl cytidine
  modified_base 18: mod_base = OTHER; note = 2'-O-methyl uridine
  modified_base 22: mod_base = OTHER; note = 2'-O-methyl uridine
  modified_base 25: mod_base = OTHER; note = 2'-O-methyl guanosine
  modified_base 29: mod_base = OTHER; note = 2'-O-methyl uridine
  modified_base 30: mod_base = OTHER; note = 2'-O-methyl adenosine
  modified_base 31: mod_base = OTHER; note = 2'-O-methyl guanosine
  modified_base 32: mod_base = OTHER; note = 2'-O-methyl cytidine
  modified_base 38: mod_base = OTHER; note = 2'-O-methyl uridine
  modified_base 39: mod_base = OTHER; note = 2'-O-methyl uridine phosphorothioate
  modified_base 40: mod_base = OTHER; note = 2'-O-methyl cytidine phosphorothioate
  modified_base 41: mod_base = OTHER; note = 2'-O-methyl uridine phosphorothioate
  modified_base 42: mod_base = OTHER; note = 2'-O-methyl cytidine

SEQ ID NO: 174 - DNA, 42 bp, synthetic construct
  source 1..42: mol_type = other DNA
  modified_base 1: mod_base = OTHER; note = 2'-O-methyl cytidine phosphorothioate
  modified_base 2: mod_base = OTHER; note = 2'-O-methyl uridine phosphorothioate
  modified_base 3: mod_base = OTHER; note = 2'-O-methyl guanosine phosphorothioate
  modified_base 4: mod_base = OTHER; note = 2'-O-methyl adenosine
  modified_base 5: mod_base = OTHER; note = 2'-O-methyl adenosine
  modified_base 9: mod_base = OTHER; note = 2'-O-methyl guanosine
  modified_base 10: mod_base = OTHER; note = 2'-O-methyl uridine
  modified_base 11: mod_base = OTHER; note = 2'-O-methyl guanosine
  modified_base 13: mod_base = OTHER; note = 2'-O-methyl cytidine
  modified_base 18: mod_base = OTHER; note = 2'-O-methyl uridine
  modified_base 22: mod_base = OTHER; note = 2'-O-methyl uridine
  modified_base 25: mod_base = OTHER; note = 2'-O-methyl guanosine
  modified_base 29: mod_base = OTHER; note = 2'-O-methyl uridine
  modified_base 30: mod_base = OTHER; note = 2'-O-methyl adenosine
  modified_base 31: mod_base = OTHER; note = 2'-O-methyl guanosine
  modified_base 32: mod_base = OTHER; note = 2'-O-methyl cytidine
  modified_base 38: mod_base = OTHER; note = 2'-O-methyl uridine
  modified_base 39: mod_base = OTHER; note = 2'-O-methyl uridine phosphorothioate
  modified_base 40: mod_base = OTHER; note = 2'-O-methyl cytidine phosphorothioate
  modified_base 41: mod_base = OTHER; note = 2'-O-methyl uridine phosphorothioate
  modified_base 42: mod_base = OTHER; note = 2'-O-methyl cytidine
  misc_feature 1..5: note = RNA
  misc_feature 6: note = DNA
  misc_feature 7..42: note = RNA
ctgaacttgtggccgtttacgtcggttgtagctccctttctc

SEQ ID NO: 175 - DNA, 42 bp, synthetic construct; identical to SEQ ID NO: 174
  source 1..42: mol_type = other DNA
  modified_base 1: mod_base = OTHER; note = 2'-O-methyl cytidine phosphorothioate
  modified_base 2: mod_base = OTHER; note = 2'-O-methyl uridine phosphorothioate
  modified_base 3: mod_base = OTHER; note = 2'-O-methyl guanosine phosphorothioate
  modified_base 4: mod_base = OTHER; note = 2'-O-methyl adenosine
  modified_base 5: mod_base = OTHER; note = 2'-O-methyl adenosine
  modified_base 9: mod_base = OTHER; note = 2'-O-methyl guanosine
  modified_base 10: mod_base = OTHER; note = 2'-O-methyl uridine
  modified_base 11: mod_base = OTHER; note = 2'-O-methyl guanosine
  modified_base 13: mod_base = OTHER; note = 2'-O-methyl cytidine
  modified_base 18: mod_base = OTHER; note = 2'-O-methyl uridine
  modified_base 22: mod_base = OTHER; note = 2'-O-methyl uridine
  modified_base 25: mod_base = OTHER; note = 2'-O-methyl guanosine
  modified_base 29: mod_base = OTHER; note = 2'-O-methyl uridine
  modified_base 30: mod_base = OTHER; note = 2'-O-methyl adenosine
  modified_base 31: mod_base = OTHER; note = 2'-O-methyl guanosine
  modified_base 32: mod_base = OTHER; note = 2'-O-methyl cytidine
  modified_base 38: mod_base = OTHER; note = 2'-O-methyl uridine
  modified_base 39: mod_base = OTHER; note = 2'-O-methyl uridine phosphorothioate
  modified_base 40: mod_base = OTHER; note = 2'-O-methyl cytidine phosphorothioate
  modified_base 41: mod_base = OTHER; note = 2'-O-methyl uridine phosphorothioate
  modified_base 42: mod_base = OTHER; note = 2'-O-methyl cytidine
  misc_feature 1..6: note = RNA
  misc_feature 7: note = DNA
  misc_feature 8..42: note = RNA

SEQ ID NO: 176 - DNA, 42 bp, synthetic construct; identical to SEQ ID NO: 174
  source 1..42: mol_type = other DNA
  modified_base 1: mod_base = OTHER; note = 2'-O-methyl cytidine phosphorothioate
  modified_base 2: mod_base = OTHER; note = 2'-O-methyl uridine phosphorothioate
  modified_base 3: mod_base = OTHER; note = 2'-O-methyl guanosine phosphorothioate
  modified_base 4: mod_base = OTHER; note = 2'-O-methyl adenosine
  modified_base 5: mod_base = OTHER; note = 2'-O-methyl adenosine
  modified_base 9: mod_base = OTHER; note = 2'-O-methyl guanosine
  modified_base 10: mod_base = OTHER; note = 2'-O-methyl uridine
  modified_base 11: mod_base = OTHER; note = 2'-O-methyl guanosine
  modified_base 13: mod_base = OTHER; note = 2'-O-methyl cytidine
  modified_base 18: mod_base = OTHER; note = 2'-O-methyl uridine
  modified_base 22: mod_base = OTHER; note = 2'-O-methyl uridine
  modified_base 25: mod_base = OTHER; note = 2'-O-methyl guanosine
  modified_base 29: mod_base = OTHER; note = 2'-O-methyl uridine
  modified_base 30: mod_base = OTHER; note = 2'-O-methyl adenosine
  modified_base 31: mod_base = OTHER; note = 2'-O-methyl guanosine
  modified_base 32: mod_base = OTHER; note = 2'-O-methyl cytidine
  modified_base 38: mod_base = OTHER; note = 2'-O-methyl uridine
  modified_base 39: mod_base = OTHER; note = 2'-O-methyl uridine phosphorothioate
  modified_base 40: mod_base = OTHER; note = 2'-O-methyl cytidine phosphorothioate
  modified_base 41: mod_base = OTHER; note = 2'-O-methyl uridine phosphorothioate
  modified_base 42: mod_base = OTHER; note = 2'-O-methyl cytidine
  misc_feature 1..7: note = RNA
  misc_feature 8: note = DNA
  misc_feature 9..42: note = RNA

SEQ ID NO: 177 - DNA, 42 bp, synthetic construct; identical to SEQ ID NO: 174
  source 1..42: mol_type = other DNA
  modified_base 1: mod_base = OTHER; note = 2'-O-methyl cytidine phosphorothioate
  modified_base 2: mod_base = OTHER; note = 2'-O-methyl uridine phosphorothioate
  modified_base 3: mod_base = OTHER; note = 2'-O-methyl guanosine phosphorothioate
  modified_base 4: mod_base = OTHER; note = 2'-O-methyl adenosine
  modified_base 5: mod_base = OTHER; note = 2'-O-methyl adenosine
  modified_base 9: mod_base = OTHER; note = 2'-O-methyl guanosine
  modified_base 10: mod_base = OTHER; note = 2'-O-methyl uridine
  modified_base 11: mod_base = OTHER; note = 2'-O-methyl guanosine
  modified_base 13: mod_base = OTHER; note = 2'-O-methyl cytidine
  modified_base 18: mod_base = OTHER; note = 2'-O-methyl uridine
  modified_base 22: mod_base = OTHER; note = 2'-O-methyl uridine
  modified_base 25: mod_base = OTHER; note = 2'-O-methyl guanosine
  modified_base 29: mod_base = OTHER; note = 2'-O-methyl uridine
  modified_base 30: mod_base = OTHER; note = 2'-O-methyl adenosine
  modified_base 31: mod_base = OTHER; note = 2'-O-methyl guanosine
  modified_base 32: mod_base = OTHER; note = 2'-O-methyl cytidine
  modified_base 38: mod_base = OTHER; note = 2'-O-methyl uridine
  modified_base 39: mod_base = OTHER; note = 2'-O-methyl uridine phosphorothioate
  modified_base 40: mod_base = OTHER; note = 2'-O-methyl cytidine phosphorothioate
  modified_base 41: mod_base = OTHER; note = 2'-O-methyl uridine phosphorothioate
  modified_base 42: mod_base = OTHER; note = 2'-O-methyl cytidine
  misc_feature 1..11: note = RNA
  misc_feature 12: note = DNA
  misc_feature 13..42: note = RNA

SEQ ID NO: 178 - DNA, 42 bp, synthetic construct; identical to SEQ ID NO: 174
  source 1..42: mol_type = other DNA
  modified_base 1: mod_base = OTHER; note = 2'-O-methyl cytidine phosphorothioate
  modified_base 2: mod_base = OTHER; note = 2'-O-methyl uridine phosphorothioate
  modified_base 3: mod_base = OTHER; note = 2'-O-methyl guanosine phosphorothioate
  modified_base 4: mod_base = OTHER; note = 2'-O-methyl adenosine
  modified_base 5: mod_base = OTHER; note = 2'-O-methyl adenosine
  modified_base 9: mod_base = OTHER; note = 2'-O-methyl guanosine
  modified_base 10: mod_base = OTHER; note = 2'-O-methyl uridine
  modified_base 11: mod_base = OTHER; note = 2'-O-methyl guanosine
  modified_base 13: mod_base = OTHER; note = 2'-O-methyl cytidine
  modified_base 18: mod_base = OTHER; note = 2'-O-methyl uridine
  modified_base 22: mod_base = OTHER; note = 2'-O-methyl uridine
  modified_base 25: mod_base = OTHER; note = 2'-O-methyl guanosine
  modified_base 29: mod_base = OTHER; note = 2'-O-methyl uridine
  modified_base 30: mod_base = OTHER; note = 2'-O-methyl adenosine
  modified_base 31: mod_base = OTHER; note = 2'-O-methyl guanosine
  modified_base 32: mod_base = OTHER; note = 2'-O-methyl cytidine
  modified_base 38: mod_base = OTHER; note = 2'-O-methyl uridine
  modified_base 39: mod_base = OTHER; note = 2'-O-methyl uridine phosphorothioate
  modified_base 40: mod_base = OTHER; note = 2'-O-methyl cytidine phosphorothioate
  modified_base 41: mod_base = OTHER; note = 2'-O-methyl uridine phosphorothioate
  modified_base 42: mod_base = OTHER; note = 2'-O-methyl cytidine
  misc_feature 1..13: note = RNA
  misc_feature 14: note = DNA
  misc_feature 15..42: note = RNA

SEQ ID NO: 179 - DNA, 42 bp, synthetic construct; identical to SEQ ID NO: 174
  source 1..42: mol_type = other DNA
  modified_base 1: mod_base = OTHER; note = 2'-O-methyl cytidine phosphorothioate
  modified_base 2: mod_base = OTHER; note = 2'-O-methyl uridine phosphorothioate
  modified_base 3: mod_base = OTHER; note = 2'-O-methyl guanosine phosphorothioate
  modified_base 4: mod_base = OTHER; note = 2'-O-methyl adenosine
  modified_base 5: mod_base = OTHER; note = 2'-O-methyl adenosine
  modified_base 9: mod_base = OTHER; note = 2'-O-methyl guanosine
  modified_base 10: mod_base = OTHER; note = 2'-O-methyl uridine
  modified_base 11: mod_base = OTHER; note = 2'-O-methyl guanosine
  modified_base 13: mod_base = OTHER; note = 2'-O-methyl cytidine
  modified_base 18: mod_base = OTHER; note = 2'-O-methyl uridine
  modified_base 22: mod_base = OTHER; note = 2'-O-methyl uridine
  modified_base 25: mod_base = OTHER; note = 2'-O-methyl guanosine
  modified_base 29: mod_base = OTHER; note = 2'-O-methyl uridine
  modified_base 30: mod_base = OTHER; note = 2'-O-methyl adenosine
  modified_base 31: mod_base = OTHER; note = 2'-O-methyl guanosine
  modified_base 32: mod_base = OTHER; note = 2'-O-methyl cytidine
  modified_base 38: mod_base = OTHER; note = 2'-O-methyl uridine
  modified_base 39: mod_base = OTHER; note = 2'-O-methyl uridine phosphorothioate
  modified_base 40: mod_base = OTHER; note = 2'-O-methyl cytidine phosphorothioate
  modified_base 41: mod_base = OTHER; note = 2'-O-methyl uridine phosphorothioate
  modified_base 42: mod_base = OTHER; note = 2'-O-methyl cytidine
  misc_feature 1..14: note = RNA
  misc_feature 15: note = DNA
  misc_feature 16..42: note = RNA

SEQ ID NO: 180 - DNA, 42 bp, synthetic construct; identical to SEQ ID NO: 174
  source 1..42: mol_type = other DNA
  modified_base 1: mod_base = OTHER; note = 2'-O-methyl cytidine phosphorothioate
  modified_base 2: mod_base = OTHER; note = 2'-O-methyl uridine phosphorothioate
  modified_base 3: mod_base = OTHER; note = 2'-O-methyl guanosine phosphorothioate
  modified_base 4: mod_base = OTHER; note = 2'-O-methyl adenosine
  modified_base 5: mod_base = OTHER; note = 2'-O-methyl adenosine
  modified_base 9: mod_base = OTHER; note = 2'-O-methyl guanosine
  modified_base 10: mod_base = OTHER; note = 2'-O-methyl uridine
  modified_base 11: mod_base = OTHER; note = 2'-O-methyl guanosine
  modified_base 13: mod_base = OTHER; note = 2'-O-methyl cytidine
  modified_base 18: mod_base = OTHER; note = 2'-O-methyl uridine
  modified_base 22: mod_base = OTHER; note = 2'-O-methyl uridine
  modified_base 25: mod_base = OTHER; note = 2'-O-methyl guanosine
  modified_base 29: mod_base = OTHER; note = 2'-O-methyl uridine
  modified_base 30: mod_base = OTHER; note = 2'-O-methyl adenosine
  modified_base 31: mod_base = OTHER; note = 2'-O-methyl guanosine
  modified_base 32: mod_base = OTHER; note = 2'-O-methyl cytidine
  modified_base 38: mod_base = OTHER; note = 2'-O-methyl uridine
  modified_base 39: mod_base = OTHER; note = 2'-O-methyl uridine phosphorothioate
  modified_base 40: mod_base = OTHER; note = 2'-O-methyl cytidine phosphorothioate
  modified_base 41: mod_base = OTHER; note = 2'-O-methyl uridine phosphorothioate
  modified_base 42: mod_base = OTHER; note = 2'-O-methyl cytidine
  misc_feature 1..15: note = RNA
  misc_feature 16: note = DNA
  misc_feature 17..42: note = RNA

SEQ ID NO: 181 - DNA, 42 bp, synthetic construct; identical to SEQ ID NO: 174
  source 1..42: mol_type = other DNA
  modified_base 1: mod_base = OTHER; note = 2'-O-methyl cytidine phosphorothioate
  modified_base 2: mod_base = OTHER; note = 2'-O-methyl uridine phosphorothioate
  modified_base 3: mod_base = OTHER; note = 2'-O-methyl guanosine phosphorothioate
  modified_base 4: mod_base = OTHER; note = 2'-O-methyl adenosine
  modified_base 5: mod_base = OTHER; note = 2'-O-methyl adenosine
  modified_base 9: mod_base = OTHER; note = 2'-O-methyl guanosine
  modified_base 10: mod_base = OTHER; note = 2'-O-methyl uridine
  modified_base 11: mod_base = OTHER; note = 2'-O-methyl guanosine
  modified_base 13: mod_base = OTHER; note = 2'-O-methyl cytidine
  modified_base 18: mod_base = OTHER; note = 2'-O-methyl uridine
  modified_base 22: mod_base = OTHER; note = 2'-O-methyl uridine
  modified_base 25: mod_base = OTHER; note = 2'-O-methyl guanosine
  modified_base 29: mod_base = OTHER; note = 2'-O-methyl uridine
  modified_base 30: mod_base = OTHER; note = 2'-O-methyl adenosine
  modified_base 31: mod_base = OTHER; note = 2'-O-methyl guanosine
  modified_base 32: mod_base = OTHER; note = 2'-O-methyl cytidine
  modified_base 38: mod_base = OTHER; note = 2'-O-methyl uridine
  modified_base 39: mod_base = OTHER; note = 2'-O-methyl uridine phosphorothioate
  modified_base 40: mod_base = OTHER; note = 2'-O-methyl cytidine phosphorothioate
  modified_base 41: mod_base = OTHER; note = 2'-O-methyl uridine phosphorothioate
  modified_base 42: mod_base = OTHER; note = 2'-O-methyl cytidine
  misc_feature 1..16: note = RNA
  misc_feature 17: note = DNA
  misc_feature 18..42: note = RNA

SEQ ID NO: 182 - DNA, 42 bp, synthetic construct; identical to SEQ ID NO: 174
  source 1..42: mol_type = other DNA
  modified_base 1: mod_base = OTHER; note = 2'-O-methyl cytidine phosphorothioate
  modified_base 2: mod_base = OTHER; note = 2'-O-methyl uridine phosphorothioate
  modified_base 3: mod_base = OTHER; note = 2'-O-methyl guanosine phosphorothioate
  modified_base 4: mod_base = OTHER; note = 2'-O-methyl adenosine
  modified_base 5: mod_base = OTHER; note = 2'-O-methyl adenosine
  modified_base 9: mod_base = OTHER; note = 2'-O-methyl guanosine
  modified_base 10: mod_base = OTHER; note = 2'-O-methyl uridine
  modified_base 11: mod_base = OTHER; note = 2'-O-methyl guanosine
  modified_base 13: mod_base = OTHER; note = 2'-O-methyl cytidine
  modified_base 18: mod_base = OTHER; note = 2'-O-methyl uridine
  modified_base 22: mod_base = OTHER; note = 2'-O-methyl uridine
  modified_base 25: mod_base = OTHER; note = 2'-O-methyl guanosine
  modified_base 29: mod_base = OTHER; note = 2'-O-methyl uridine
  modified_base 30: mod_base = OTHER; note = 2'-O-methyl adenosine
  modified_base 31: mod_base = OTHER; note = 2'-O-methyl guanosine
  modified_base 32: mod_base = OTHER; note = 2'-O-methyl cytidine
  modified_base 38: mod_base = OTHER; note = 2'-O-methyl uridine
  modified_base 39: mod_base = OTHER; note = 2'-O-methyl uridine phosphorothioate
  modified_base 40: mod_base = OTHER; note = 2'-O-methyl cytidine phosphorothioate
  modified_base 41: mod_base = OTHER; note = 2'-O-methyl uridine phosphorothioate
  modified_base 42: mod_base = OTHER; note = 2'-O-methyl cytidine
  misc_feature 1..18: note = RNA
  misc_feature 19: note = DNA
  misc_feature 20..42: note = RNA

SEQ ID NO: 183 - DNA, 42 bp, synthetic construct; identical to SEQ ID NO: 174
  source 1..42: mol_type = other DNA
  modified_base 1: mod_base = OTHER; note = 2'-O-methyl cytidine phosphorothioate
  modified_base 2: mod_base = OTHER; note = 2'-O-methyl uridine phosphorothioate
  modified_base 3: mod_base = OTHER; note = 2'-O-methyl guanosine phosphorothioate
  modified_base 4: mod_base = OTHER; note = 2'-O-methyl adenosine
  modified_base 5: mod_base = OTHER; note = 2'-O-methyl adenosine
  modified_base 9: mod_base = OTHER; note = 2'-O-methyl guanosine
  modified_base 10: mod_base = OTHER; note = 2'-O-methyl uridine
  modified_base 11: mod_base = OTHER; note = 2'-O-methyl guanosine
  modified_base 13: mod_base = OTHER; note = 2'-O-methyl cytidine
  modified_base 18: mod_base = OTHER; note = 2'-O-methyl uridine
  modified_base 22: mod_base = OTHER; note = 2'-O-methyl uridine
  modified_base 25: mod_base = OTHER; note = 2'-O-methyl guanosine
  modified_base 29: mod_base = OTHER; note = 2'-O-methyl uridine
  modified_base 30: mod_base = OTHER; note = 2'-O-methyl adenosine
  modified_base 31: mod_base = OTHER; note = 2'-O-methyl guanosine
  modified_base 32: mod_base = OTHER; note = 2'-O-methyl cytidine
  modified_base 38: mod_base = OTHER; note = 2'-O-methyl uridine
  modified_base 39: mod_base = OTHER; note = 2'-O-methyl uridine phosphorothioate
  modified_base 40: mod_base = OTHER; note = 2'-O-methyl cytidine phosphorothioate
  modified_base 41: mod_base = OTHER; note = 2'-O-methyl uridine phosphorothioate
  modified_base 42: mod_base = OTHER; note = 2'-O-methyl cytidine
  misc_feature 1..19: note = RNA
  misc_feature 20: note = DNA
  misc_feature 21..42: note = RNA

SEQ ID NO: 184 - DNA, 42 bp, synthetic construct; identical to SEQ ID NO: 174
  source 1..42: mol_type = other DNA
  modified_base 1: mod_base = OTHER; note = 2'-O-methyl cytidine phosphorothioate
  modified_base 2: mod_base = OTHER; note = 2'-O-methyl uridine phosphorothioate
  modified_base 3: mod_base = OTHER; note = 2'-O-methyl guanosine phosphorothioate
  modified_base 4: mod_base = OTHER; note = 2'-O-methyl adenosine
  modified_base 5: mod_base = OTHER; note = 2'-O-methyl adenosine
  modified_base 9: mod_base = OTHER; note = 2'-O-methyl guanosine
  modified_base 10: mod_base = OTHER; note = 2'-O-methyl uridine
  modified_base 11: mod_base = OTHER; note = 2'-O-methyl guanosine
  modified_base 13: mod_base = OTHER; note = 2'-O-methyl cytidine
  modified_base 18: mod_base = OTHER; note = 2'-O-methyl uridine
  modified_base 22: mod_base = OTHER; note = 2'-O-methyl uridine
  modified_base 25: mod_base = OTHER; note = 2'-O-methyl guanosine
  modified_base 29: mod_base = OTHER; note = 2'-O-methyl uridine
  modified_base 30: mod_base = OTHER; note = 2'-O-methyl adenosine
  modified_base 31: mod_base = OTHER; note = 2'-O-methyl guanosine
  modified_base 32: mod_base = OTHER; note = 2'-O-methyl cytidine
  modified_base 38: mod_base = OTHER; note = 2'-O-methyl uridine
  modified_base 39: mod_base = OTHER; note = 2'-O-methyl uridine phosphorothioate
  modified_base 40: mod_base = OTHER; note = 2'-O-methyl cytidine phosphorothioate
  modified_base 41: mod_base = OTHER; note = 2'-O-methyl uridine phosphorothioate
  modified_base 42: mod_base = OTHER; note = 2'-O-methyl cytidine
  misc_feature 1..20: note = RNA
  misc_feature 21: note = DNA
  misc_feature 22..42: note = RNA

SEQ ID NO: 185 - DNA, 42 bp, synthetic construct; identical to SEQ ID NO: 174
  source 1..42: mol_type = other DNA
  modified_base 1: mod_base = OTHER; note = 2'-O-methyl cytidine phosphorothioate
  modified_base 2: mod_base = OTHER; note = 2'-O-methyl uridine phosphorothioate
  modified_base 3: mod_base = OTHER; note = 2'-O-methyl guanosine phosphorothioate
  modified_base 4: mod_base = OTHER; note = 2'-O-methyl adenosine
  modified_base 5: mod_base = OTHER; note = 2'-O-methyl adenosine
  modified_base 9: mod_base = OTHER; note = 2'-O-methyl guanosine
  modified_base 10: mod_base = OTHER; note = 2'-O-methyl uridine
  modified_base 11: mod_base = OTHER; note = 2'-O-methyl guanosine
  modified_base 13: mod_base = OTHER; note = 2'-O-methyl cytidine
  modified_base 18: mod_base = OTHER; note = 2'-O-methyl uridine
  modified_base 22: mod_base = OTHER; note = 2'-O-methyl uridine
  modified_base 25: mod_base = OTHER; note = 2'-O-methyl guanosine
  modified_base 29: mod_base = OTHER; note = 2'-O-methyl uridine
  modified_base 30: mod_base = OTHER; note = 2'-O-methyl adenosine
  modified_base 31: mod_base = OTHER; note = 2'-O-methyl guanosine
  modified_base 32: mod_base = OTHER; note = 2'-O-methyl cytidine
  modified_base 38: mod_base = OTHER; note = 2'-O-methyl uridine
  modified_base 39: mod_base = OTHER; note = 2'-O-methyl uridine phosphorothioate
  modified_base 40: mod_base = OTHER; note = 2'-O-methyl cytidine phosphorothioate
  modified_base 41: mod_base = OTHER; note = 2'-O-methyl uridine phosphorothioate
  modified_base 42: mod_base = OTHER; note = 2'-O-methyl cytidine
  misc_feature 1..22: note = RNA
  misc_feature 23: note = DNA
  misc_feature 24..42: note = RNA

SEQ ID NO: 186 - DNA, 42 bp, synthetic construct; identical to SEQ ID NO: 174
  source 1..42: mol_type = other DNA
  modified_base 1: mod_base = OTHER; note = 2'-O-methyl cytidine phosphorothioate
  modified_base 2: mod_base = OTHER; note = 2'-O-methyl uridine phosphorothioate
  modified_base 3: mod_base = OTHER; note = 2'-O-methyl guanosine phosphorothioate
  modified_base 4: mod_base = OTHER; note = 2'-O-methyl adenosine
  modified_base 5: mod_base = OTHER; note = 2'-O-methyl adenosine
  modified_base 9: mod_base = OTHER; note = 2'-O-methyl guanosine
  modified_base 10: mod_base = OTHER; note = 2'-O-methyl uridine
  modified_base 11: mod_base = OTHER; note = 2'-O-methyl guanosine
  modified_base 13: mod_base = OTHER; note = 2'-O-methyl cytidine
  modified_base 18: mod_base = OTHER; note = 2'-O-methyl uridine
  modified_base 22: mod_base = OTHER; note = 2'-O-methyl uridine
  modified_base 25: mod_base = OTHER; note = 2'-O-methyl guanosine
  modified_base 29: mod_base = OTHER; note = 2'-O-methyl uridine
  modified_base 30: mod_base = OTHER; note = 2'-O-methyl adenosine
  modified_base 31: mod_base = OTHER; note = 2'-O-methyl guanosine
  modified_base 32: mod_base = OTHER; note = 2'-O-methyl cytidine
  modified_base 38: mod_base = OTHER; note = 2'-O-methyl uridine
  modified_base 39: mod_base = OTHER; note = 2'-O-methyl uridine phosphorothioate
  modified_base 40: mod_base = OTHER; note = 2'-O-methyl cytidine phosphorothioate
  modified_base 41: mod_base = OTHER; note = 2'-O-methyl uridine phosphorothioate
  modified_base 42: mod_base = OTHER; note = 2'-O-methyl cytidine
  misc_feature 1..23: note = RNA
  misc_feature 24: note = DNA
  misc_feature 25..42: note = RNA

SEQ ID NO: 187 - DNA, 42 bp, synthetic construct; identical to SEQ ID NO: 174
  source 1..42: mol_type = other DNA
  modified_base 1: mod_base = OTHER; note = 2'-O-methyl cytidine phosphorothioate
  modified_base 2: mod_base = OTHER; note = 2'-O-methyl uridine phosphorothioate
  modified_base 3: mod_base = OTHER; note = 2'-O-methyl guanosine phosphorothioate
  modified_base 4: mod_base = OTHER; note = 2'-O-methyl adenosine
  modified_base 5: mod_base = OTHER; note = 2'-O-methyl adenosine
  modified_base 9: mod_base = OTHER; note = 2'-O-methyl guanosine
  modified_base 10: mod_base = OTHER; note = 2'-O-methyl uridine
  modified_base 11: mod_base = OTHER; note = 2'-O-methyl guanosine
  modified_base 13: mod_base = OTHER; note = 2'-O-methyl cytidine
  modified_base 18: mod_base = OTHER; note = 2'-O-methyl uridine
  modified_base 22: mod_base = OTHER; note = 2'-O-methyl uridine
  modified_base 25: mod_base = OTHER; note = 2'-O-methyl guanosine
  modified_base 29: mod_base = OTHER; note = 2'-O-methyl uridine
  modified_base 30: mod_base = OTHER; note = 2'-O-methyl adenosine
  modified_base 31: mod_base = OTHER; note = 2'-O-methyl guanosine
  modified_base 32: mod_base = OTHER; note = 2'-O-methyl cytidine
  modified_base 38: mod_base = OTHER; note = 2'-O-methyl uridine
  modified_base 39: mod_base = OTHER; note = 2'-O-methyl uridine phosphorothioate
  modified_base 40: mod_base = OTHER; note = 2'-O-methyl cytidine phosphorothioate
  modified_base 41: mod_base = OTHER; note = 2'-O-methyl uridine phosphorothioate
  modified_base 42: mod_base = OTHER; note = 2'-O-methyl cytidine
  misc_feature 1..25: note = RNA
  misc_feature 26: note = DNA
  misc_feature 27..42: note = RNA

SEQ ID NO: 188 - DNA, 42 bp, synthetic construct; identical to SEQ ID NO: 174
  source 1..42: mol_type = other DNA
  modified_base 1: mod_base = OTHER; note = 2'-O-methyl cytidine phosphorothioate
  modified_base 2: mod_base = OTHER; note = 2'-O-methyl uridine phosphorothioate
  modified_base 3: mod_base = OTHER; note = 2'-O-methyl guanosine phosphorothioate
  modified_base 4: mod_base = OTHER; note = 2'-O-methyl adenosine
  modified_base 5: mod_base = OTHER; note = 2'-O-methyl adenosine
  modified_base 9: mod_base = OTHER; note = 2'-O-methyl guanosine
  modified_base 10: mod_base = OTHER; note = 2'-O-methyl uridine
  modified_base 11: mod_base = OTHER; note = 2'-O-methyl guanosine
  modified_base 13: mod_base = OTHER; note = 2'-O-methyl cytidine
  modified_base 18: mod_base = OTHER; note = 2'-O-methyl uridine
  modified_base 22: mod_base = OTHER; note = 2'-O-methyl uridine
  modified_base 25: mod_base = OTHER; note = 2'-O-methyl guanosine
  modified_base 29: mod_base = OTHER; note = 2'-O-methyl uridine
  modified_base 30: mod_base = OTHER; note = 2'-O-methyl adenosine
  modified_base 31: mod_base = OTHER; note = 2'-O-methyl guanosine
  modified_base 32: mod_base = OTHER; note = 2'-O-methyl cytidine
  modified_base 38: mod_base = OTHER; note = 2'-O-methyl uridine
  modified_base 39: mod_base = OTHER; note = 2'-O-methyl uridine phosphorothioate
  modified_base 40: mod_base = OTHER; note = 2'-O-methyl cytidine phosphorothioate
  modified_base 41: mod_base = OTHER; note = 2'-O-methyl uridine phosphorothioate
  modified_base 42: mod_base = OTHER; note = 2'-O-methyl cytidine
  misc_feature 1..26: note = RNA
  misc_feature 27: note = DNA
  misc_feature 28..42: note = RNA

SEQ ID NO: 189 - DNA, 42 bp, synthetic construct; identical to SEQ ID NO: 174
  source 1..42: mol_type = other DNA
  modified_base 1: mod_base = OTHER; note = 2'-O-methyl cytidine phosphorothioate
  modified_base 2: mod_base = OTHER; note = 2'-O-methyl uridine phosphorothioate
  modified_base 3: mod_base = OTHER; note = 2'-O-methyl guanosine phosphorothioate
  modified_base 4: mod_base = OTHER; note = 2'-O-methyl adenosine
  modified_base 5: mod_base = OTHER; note = 2'-O-methyl adenosine
  modified_base 9: mod_base = OTHER; note = 2'-O-methyl guanosine
  modified_base 10: mod_base = OTHER; note = 2'-O-methyl uridine
  modified_base 11: mod_base = OTHER; note = 2'-O-methyl guanosine
  modified_base 13: mod_base = OTHER; note = 2'-O-methyl cytidine
  modified_base 18: mod_base = OTHER; note = 2'-O-methyl uridine
  modified_base 22: mod_base = OTHER; note = 2'-O-methyl uridine
  modified_base 25: mod_base = OTHER; note = 2'-O-methyl guanosine
  modified_base 29: mod_base = OTHER; note = 2'-O-methyl uridine
  modified_base 30: mod_base = OTHER; note = 2'-O-methyl adenosine
  modified_base 31: mod_base = OTHER; note = 2'-O-methyl guanosine
  modified_base 32: mod_base = OTHER; note = 2'-O-methyl cytidine
  modified_base 38: mod_base = OTHER; note = 2'-O-methyl uridine
  modified_base 39: mod_base = OTHER; note = 2'-O-methyl uridine phosphorothioate
  modified_base 40: mod_base = OTHER; note = 2'-O-methyl cytidine phosphorothioate
  modified_base 41: mod_base = OTHER; note = 2'-O-methyl uridine phosphorothioate
  modified_base 42: mod_base = OTHER; note = 2'-O-methyl cytidine
  misc_feature 1..27: note = RNA
  misc_feature 28: note = DNA
  misc_feature 29..42: note = RNA

SEQ ID NO: 190 - DNA, 42 bp, synthetic construct; identical to SEQ ID NO: 174
  source 1..42: mol_type = other DNA
  modified_base 1: mod_base = OTHER; note = 2'-O-methyl cytidine phosphorothioate
  modified_base 2: mod_base = OTHER; note = 2'-O-methyl uridine phosphorothioate
  modified_base 3: mod_base = OTHER; note = 2'-O-methyl guanosine phosphorothioate
  modified_base 4: mod_base = OTHER; note = 2'-O-methyl adenosine
  modified_base 5: mod_base = OTHER; note = 2'-O-methyl adenosine
  modified_base 9: mod_base = OTHER; note = 2'-O-methyl guanosine
  modified_base 10: mod_base = OTHER; note = 2'-O-methyl uridine
  modified_base 11: mod_base = OTHER; note = 2'-O-methyl guanosine
  modified_base 13: mod_base = OTHER; note = 2'-O-methyl cytidine
  modified_base 18: mod_base = OTHER; note = 2'-O-methyl uridine
  modified_base 22: mod_base = OTHER; note = 2'-O-methyl uridine
  modified_base 25: mod_base = OTHER; note = 2'-O-methyl guanosine
  modified_base 29: mod_base = OTHER; note = 2'-O-methyl uridine
  modified_base 30: mod_base = OTHER; note = 2'-O-methyl adenosine
  modified_base 31: mod_base = OTHER; note = 2'-O-methyl guanosine
  modified_base 32: mod_base = OTHER; note = 2'-O-methyl cytidine
  modified_base 38: mod_base = OTHER; note = 2'-O-methyl uridine
  modified_base 39: mod_base = OTHER; note = 2'-O-methyl uridine phosphorothioate
  modified_base 40: mod_base = OTHER; note = 2'-O-methyl cytidine phosphorothioate
  modified_base 41: mod_base = OTHER; note = 2'-O-methyl uridine phosphorothioate
  modified_base 42: mod_base = OTHER; note = 2'-O-methyl cytidine
  misc_feature 1..32: note = RNA
  misc_feature 33: note = DNA
  misc_feature 34..42: note = RNA

SEQ ID NO: 191 - DNA, 42 bp, synthetic construct; identical to SEQ ID NO: 174
  source 1..42: mol_type = other DNA
  modified_base 1: mod_base = OTHER; note = 2'-O-methyl cytidine phosphorothioate
  modified_base 2: mod_base = OTHER; note = 2'-O-methyl uridine phosphorothioate
  modified_base 3: mod_base = OTHER; note = 2'-O-methyl guanosine phosphorothioate
  modified_base 4: mod_base = OTHER; note = 2'-O-methyl adenosine
  modified_base 5: mod_base = OTHER; note = 2'-O-methyl adenosine
  modified_base 9: mod_base = OTHER; note = 2'-O-methyl guanosine
  modified_base 10: mod_base = OTHER; note = 2'-O-methyl uridine
  modified_base 11: mod_base = OTHER; note = 2'-O-methyl guanosine
  modified_base 13: mod_base = OTHER; note = 2'-O-methyl cytidine
  modified_base 18: mod_base = OTHER; note = 2'-O-methyl uridine
  modified_base 22: mod_base = OTHER; note = 2'-O-methyl uridine
  modified_base 25: mod_base = OTHER; note = 2'-O-methyl guanosine
  modified_base 29: mod_base = OTHER; note = 2'-O-methyl uridine
  modified_base 30: mod_base = OTHER; note = 2'-O-methyl adenosine
  modified_base 31: mod_base = OTHER; note = 2'-O-methyl guanosine
  modified_base 32: mod_base = OTHER; note = 2'-O-methyl cytidine
  modified_base 38: mod_base = OTHER; note = 2'-O-methyl uridine
  modified_base 39: mod_base = OTHER; note = 2'-O-methyl uridine phosphorothioate
  modified_base 40: mod_base = OTHER; note = 2'-O-methyl cytidine phosphorothioate
  modified_base 41: mod_base = OTHER; note = 2'-O-methyl uridine phosphorothioate
  modified_base 42: mod_base = OTHER; note = 2'-O-methyl cytidine
  misc_feature 1..33: note = RNA
  misc_feature 34: note = DNA
  misc_feature 35..42: note = RNA

SEQ ID NO: 192 - DNA, 42 bp, synthetic construct; identical to SEQ ID NO: 174
  source 1..42: mol_type = other DNA
  modified_base 1: mod_base = OTHER; note = 2'-O-methyl cytidine phosphorothioate
  modified_base 2: mod_base = OTHER; note = 2'-O-methyl uridine phosphorothioate
  modified_base 3: mod_base = OTHER; note = 2'-O-methyl guanosine phosphorothioate
  modified_base 4: mod_base = OTHER; note = 2'-O-methyl adenosine
  modified_base 5: mod_base = OTHER; note = 2'-O-methyl adenosine
  modified_base 9: mod_base = OTHER; note = 2'-O-methyl guanosine
  modified_base 10: mod_base = OTHER; note = 2'-O-methyl uridine
  modified_base 11: mod_base = OTHER; note = 2'-O-methyl guanosine
  modified_base 13: mod_base = OTHER; note = 2'-O-methyl cytidine
  modified_base 18: mod_base = OTHER; note = 2'-O-methyl uridine
  modified_base 22: mod_base = OTHER; note = 2'-O-methyl uridine
  modified_base 25: mod_base = OTHER; note = 2'-O-methyl guanosine
  modified_base 29: mod_base = OTHER; note = 2'-O-methyl uridine
  modified_base 30: mod_base = OTHER; note = 2'-O-methyl adenosine
  modified_base 31: mod_base = OTHER; note = 2'-O-methyl guanosine
  modified_base 32: mod_base = OTHER; note = 2'-O-methyl cytidine
  modified_base 38: mod_base = OTHER; note = 2'-O-methyl uridine
  modified_base 39: mod_base = OTHER; note = 2'-O-methyl uridine phosphorothioate
  modified_base 40: mod_base = OTHER; note = 2'-O-methyl cytidine phosphorothioate
  modified_base 41: mod_base = OTHER; note = 2'-O-methyl uridine phosphorothioate
  modified_base 42: mod_base = OTHER; note = 2'-O-methyl cytidine
  misc_feature 1..34: note = RNA
  misc_feature 35: note = DNA
  misc_feature 36..42: note = RNA

SEQ ID NO: 193 - DNA, 42 bp, synthetic construct; identical to SEQ ID NO: 174
  source 1..42: mol_type = other DNA
  modified_base 1: mod_base = OTHER; note = 2'-O-methyl cytidine phosphorothioate
  modified_base 2: mod_base = OTHER; note = 2'-O-methyl uridine phosphorothioate
  modified_base 3: mod_base = OTHER; note = 2'-O-methyl guanosine phosphorothioate
  modified_base 4: mod_base = OTHER; note = 2'-O-methyl adenosine
  modified_base 5: mod_base = OTHER; note = 2'-O-methyl adenosine
  modified_base 9: mod_base = OTHER; note = 2'-O-methyl guanosine
  modified_base 10: mod_base = OTHER; note = 2'-O-methyl uridine
  modified_base 11: mod_base = OTHER; note = 2'-O-methyl guanosine
  modified_base 13: mod_base = OTHER; note = 2'-O-methyl cytidine
  modified_base 18: mod_base = OTHER; note = 2'-O-methyl uridine
  modified_base 22: mod_base = OTHER; note = 2'-O-methyl uridine
  modified_base 25: mod_base = OTHER; note = 2'-O-methyl guanosine
  modified_base 29: mod_base = OTHER; note = 2'-O-methyl uridine
  modified_base 30: mod_base = OTHER; note = 2'-O-methyl adenosine
  modified_base 31: mod_base = OTHER; note = 2'-O-methyl guanosine
  modified_base 32: mod_base = OTHER; note = 2'-O-methyl cytidine
  modified_base 38: mod_base = OTHER; note = 2'-O-methyl uridine
  modified_base 39: mod_base = OTHER; note = 2'-O-methyl uridine phosphorothioate
  modified_base 40: mod_base = OTHER; note = 2'-O-methyl cytidine phosphorothioate
  modified_base 41: mod_base = OTHER; note = 2'-O-methyl uridine phosphorothioate
  modified_base 42: mod_base = OTHER; note = 2'-O-methyl cytidine
  misc_feature 1..35: note = RNA
  misc_feature 36: note = DNA
  misc_feature 37..42: note = RNA

SEQ ID NO: 194 - DNA, 42 bp, synthetic construct; identical to SEQ ID NO: 174
  source 1..42: mol_type = other DNA
  modified_base 1: mod_base = OTHER; note = 2'-O-methyl cytidine phosphorothioate
  modified_base 2: mod_base = OTHER; note = 2'-O-methyl uridine phosphorothioate
  modified_base 3: mod_base = OTHER; note = 2'-O-methyl guanosine phosphorothioate
  modified_base 4: mod_base = OTHER; note = 2'-O-methyl adenosine
  modified_base 5: mod_base = OTHER; note = 2'-O-methyl adenosine
  modified_base 9: mod_base = OTHER; note = 2'-O-methyl guanosine
  modified_base 10: mod_base = OTHER; note = 2'-O-methyl uridine
  modified_base 11: mod_base = OTHER; note = 2'-O-methyl guanosine
  modified_base 13: mod_base = OTHER; note = 2'-O-methyl cytidine
  modified_base 18: mod_base = OTHER; note = 2'-O-methyl uridine
  modified_base 22: mod_base = OTHER; note = 2'-O-methyl uridine
  modified_base 25: mod_base = OTHER; note = 2'-O-methyl guanosine
  modified_base 29: mod_base = OTHER; note = 2'-O-methyl uridine
  modified_base 30: mod_base = OTHER; note = 2'-O-methyl adenosine
  modified_base 31: mod_base = OTHER; note = 2'-O-methyl guanosine
  modified_base 32: mod_base = OTHER; note = 2'-O-methyl cytidine
  modified_base 38: mod_base = OTHER; note = 2'-O-methyl uridine
  modified_base 39: mod_base = OTHER; note = 2'-O-methyl uridine phosphorothioate
  modified_base 40: mod_base = OTHER; note = 2'-O-methyl cytidine phosphorothioate
  modified_base 41: mod_base = OTHER; note = 2'-O-methyl uridine phosphorothioate
  modified_base 42: mod_base = OTHER; note = 2'-O-methyl cytidine
  misc_feature 1..36: note = RNA
  misc_feature 37: note = DNA
  misc_feature 38..42: note = RNA

SEQ ID NO: 195 - RNA, 42 nt, synthetic construct; identical to SEQ ID NO: 126
  source 1..42: mol_type = other RNA
  modified_base 1: mod_base = OTHER; note = 2'-O-methyl cytidine phosphorothioate
  modified_base 2: mod_base = OTHER; note = 2'-O-methyl uridine phosphorothioate
  modified_base 3: mod_base = OTHER; note = 2'-O-methyl guanosine phosphorothioate
  modified_base 4: mod_base = OTHER; note = 2'-O-methyl adenosine
  modified_base 5: mod_base = OTHER; note = 2'-O-methyl adenosine
  modified_base 6: mod_base = OTHER; note = Cytidine phosphorothioate
  modified_base 9: mod_base = OTHER; note = 2'-O-methyl guanosine
  modified_base 10: mod_base = OTHER; note = 2'-O-methyl uridine
  modified_base 11: mod_base = OTHER; note = 2'-O-methyl guanosine
  modified_base 13: mod_base = OTHER; note = 2'-O-methyl cytidine
  modified_base 18: mod_base = OTHER; note = 2'-O-methyl uridine
  modified_base 22: mod_base = OTHER; note = 2'-O-methyl uridine
  modified_base 25: mod_base = OTHER; note = 2'-O-methyl guanosine
  modified_base 29: mod_base = OTHER; note = 2'-O-methyl uridine
  modified_base 30: mod_base = OTHER; note = 2'-O-methyl adenosine
  modified_base 31: mod_base = OTHER; note = 2'-O-methyl guanosine
  modified_base 32: mod_base = OTHER; note = 2'-O-methyl cytidine
  modified_base 38: mod_base = OTHER; note = 2'-O-methyl uridine
  modified_base 39: mod_base = OTHER; note = 2'-O-methyl uridine phosphorothioate
  modified_base 40: mod_base = OTHER; note = 2'-O-methyl cytidine phosphorothioate
  modified_base 41: mod_base = OTHER; note = 2'-O-methyl uridine phosphorothioate
  modified_base 42: mod_base = OTHER; note = 2'-O-methyl cytidine

SEQ ID NO: 196 - RNA, 42 nt, synthetic construct; identical to SEQ ID NO: 126
  source 1..42: mol_type = other RNA
  modified_base 1: mod_base = OTHER; note = 2'-O-methyl cytidine phosphorothioate
  modified_base 2: mod_base = OTHER; note = 2'-O-methyl uridine phosphorothioate
  modified_base 3: mod_base = OTHER; note = 2'-O-methyl guanosine phosphorothioate
  modified_base 4: mod_base = OTHER; note = 2'-O-methyl adenosine
  modified_base 5: mod_base = OTHER; note = 2'-O-methyl adenosine
  modified_base 7: mod_base = OTHER; note = Uridine phosphorothioate
  modified_base 9: mod_base = OTHER; note = 2'-O-methyl guanosine
  modified_base 10: mod_base = OTHER; note = 2'-O-methyl uridine
  modified_base 11: mod_base = OTHER; note = 2'-O-methyl guanosine
  modified_base 13: mod_base = OTHER; note = 2'-O-methyl cytidine
  modified_base 18: mod_base = OTHER; note = 2'-O-methyl uridine
  modified_base 22: mod_base = OTHER; note = 2'-O-methyl uridine
  modified_base 25: mod_base = OTHER; note = 2'-O-methyl guanosine
  modified_base 29: mod_base = OTHER; note = 2'-O-methyl uridine
  modified_base 30: mod_base = OTHER; note = 2'-O-methyl adenosine
  modified_base 31: mod_base = OTHER; note = 2'-O-methyl guanosine
  modified_base 32: mod_base = OTHER; note = 2'-O-methyl cytidine
  modified_base 38: mod_base = OTHER; note = 2'-O-methyl uridine
  modified_base 39: mod_base = OTHER; note = 2'-O-methyl uridine phosphorothioate
  modified_base 40: mod_base = OTHER; note = 2'-O-methyl cytidine phosphorothioate
  modified_base 41: mod_base = OTHER; note = 2'-O-methyl uridine phosphorothioate
  modified_base 42: mod_base = OTHER; note = 2'-O-methyl cytidine

SEQ ID NO: 197 - RNA, 42 nt, synthetic construct; identical to SEQ ID NO: 126
  source 1..42: mol_type = other RNA
  modified_base 1: mod_base = OTHER; note = 2'-O-methyl cytidine phosphorothioate
  modified_base 2: mod_base = OTHER; note = 2'-O-methyl uridine phosphorothioate
  modified_base 3: mod_base = OTHER; note = 2'-O-methyl guanosine phosphorothioate
  modified_base 4: mod_base = OTHER; note = 2'-O-methyl adenosine
  modified_base 5: mod_base = OTHER; note = 2'-O-methyl adenosine
  modified_base 8: mod_base = OTHER; note = Uridine phosphorothioate
  modified_base 9: mod_base = OTHER; note = 2'-O-methyl guanosine
  modified_base 10: mod_base = OTHER; note = 2'-O-methyl uridine
  modified_base 11: mod_base = OTHER; note = 2'-O-methyl guanosine
  modified_base 13: mod_base = OTHER; note = 2'-O-methyl cytidine
  modified_base 18: mod_base = OTHER; note = 2'-O-methyl uridine
  modified_base 22: mod_base = OTHER; note = 2'-O-methyl uridine
  modified_base 25: mod_base = OTHER; note = 2'-O-methyl guanosine
  modified_base 29: mod_base = OTHER; note = 2'-O-methyl uridine
  modified_base 30: mod_base = OTHER; note = 2'-O-methyl adenosine
  modified_base 31: mod_base = OTHER; note = 2'-O-methyl guanosine
  modified_base 32: mod_base = OTHER; note = 2'-O-methyl cytidine
  modified_base 38: mod_base = OTHER; note = 2'-O-methyl uridine
  modified_base 39: mod_base = OTHER; note = 2'-O-methyl uridine phosphorothioate
  modified_base 40: mod_base = OTHER; note = 2'-O-methyl cytidine phosphorothioate
  modified_base 41: mod_base = OTHER; note = 2'-O-methyl uridine phosphorothioate
  modified_base 42: mod_base = OTHER; note = 2'-O-methyl cytidine

SEQ ID NO: 198 - RNA, 42 nt, synthetic construct; identical to SEQ ID NO: 126
  source 1..42: mol_type = other RNA
  modified_base 1: mod_base = OTHER; note = 2'-O-methyl cytidine phosphorothioate
  modified_base 2: mod_base = OTHER; note = 2'-O-methyl uridine phosphorothioate
  modified_base 3: mod_base = OTHER; note = 2'-O-methyl guanosine phosphorothioate
  modified_base 4: mod_base = OTHER; note = 2'-O-methyl adenosine
  modified_base 5: mod_base = OTHER; note = 2'-O-methyl adenosine
  modified_base 9: mod_base = OTHER; note = 2'-O-methyl guanosine
  modified_base 10: mod_base = OTHER; note = 2'-O-methyl uridine
  modified_base 11: mod_base = OTHER; note = 2'-O-methyl guanosine
  modified_base 12: mod_base = OTHER; note = Guanosine phosphorothioate
  modified_base 13: mod_base = OTHER; note = 2'-O-methyl cytidine
  modified_base 18: mod_base = OTHER; note = 2'-O-methyl uridine
  modified_base 22: mod_base = OTHER; note = 2'-O-methyl uridine
  modified_base 25: mod_base = OTHER; note = 2'-O-methyl guanosine
  modified_base 29: mod_base = OTHER; note = 2'-O-methyl uridine
  modified_base 30: mod_base = OTHER; note = 2'-O-methyl adenosine
  modified_base 31: mod_base = OTHER; note = 2'-O-methyl guanosine
  modified_base 32: mod_base = OTHER; note = 2'-O-methyl cytidine
  modified_base 38: mod_base = OTHER; note = 2'-O-methyl uridine
  modified_base 39: mod_base = OTHER; note = 2'-O-methyl uridine phosphorothioate
  modified_base 40: mod_base = OTHER; note = 2'-O-methyl cytidine phosphorothioate
  modified_base 41: mod_base = OTHER; note = 2'-O-methyl uridine phosphorothioate
  modified_base 42: mod_base = OTHER; note = 2'-O-methyl cytidine

SEQ ID NO: 199 - RNA, 42 nt, synthetic construct; identical to SEQ ID NO: 126
  source 1..42: mol_type = other RNA
  modified_base 1: mod_base = OTHER; note = 2'-O-methyl cytidine phosphorothioate
  modified_base 2: mod_base = OTHER; note = 2'-O-methyl uridine phosphorothioate
  modified_base 3: mod_base = OTHER; note = 2'-O-methyl guanosine phosphorothioate
  modified_base 4: mod_base = OTHER; note = 2'-O-methyl adenosine
  modified_base 5: mod_base = OTHER; note = 2'-O-methyl adenosine
  modified_base 9: mod_base = OTHER; note = 2'-O-methyl guanosine
  modified_base 10: mod_base = OTHER; note = 2'-O-methyl uridine
  modified_base 11: mod_base = OTHER; note = 2'-O-methyl guanosine
  modified_base 13: mod_base = OTHER; note = 2'-O-methyl cytidine
  modified_base 14: mod_base = OTHER; note = Cytidine phosphorothioate
  modified_base 18: mod_base = OTHER; note = 2'-O-methyl uridine
  modified_base 22: mod_base = OTHER; note = 2'-O-methyl uridine
  modified_base 25: mod_base = OTHER; note = 2'-O-methyl guanosine
  modified_base 29: mod_base = OTHER; note = 2'-O-methyl uridine
  modified_base 30: mod_base = OTHER; note = 2'-O-methyl adenosine
  modified_base 31: mod_base = OTHER; note = 2'-O-methyl guanosine
  modified_base 32: mod_base = OTHER; note = 2'-O-methyl cytidine
  modified_base 38: mod_base = OTHER; note = 2'-O-methyl uridine
  modified_base 39: mod_base = OTHER; note = 2'-O-methyl uridine phosphorothioate
  modified_base 40: mod_base = OTHER; note = 2'-O-methyl cytidine phosphorothioate
  modified_base 41: mod_base = OTHER; note = 2'-O-methyl uridine phosphorothioate
  modified_base 42: mod_base = OTHER; note = 2'-O-methyl cytidine

SEQ ID NO: 200 - RNA, 42 nt, synthetic construct; identical to SEQ ID NO: 126
  source 1..42: mol_type = other RNA
  modified_base 1: mod_base = OTHER; note = 2'-O-methyl cytidine phosphorothioate
  modified_base 2: mod_base = OTHER; note = 2'-O-methyl uridine phosphorothioate
  modified_base 3: mod_base = OTHER; note = 2'-O-methyl guanosine phosphorothioate
  modified_base 4: mod_base = OTHER; note = 2'-O-methyl adenosine
  modified_base 5: mod_base = OTHER; note = 2'-O-methyl adenosine
  modified_base 9: mod_base = OTHER; note = 2'-O-methyl guanosine
  modified_base 10: mod_base = OTHER; note = 2'-O-methyl uridine
  modified_base 11: mod_base = OTHER; note = 2'-O-methyl guanosine
  modified_base 13: mod_base = OTHER; note = 2'-O-methyl cytidine
  modified_base 15: mod_base = OTHER; note = Guanosine phosphorothioate
  modified_base 18: mod_base = OTHER; note = 2'-O-methyl uridine
  modified_base 22: mod_base = OTHER; note = 2'-O-methyl uridine
  modified_base 25: mod_base = OTHER; note = 2'-O-methyl guanosine
  modified_base 29: mod_base = OTHER; note = 2'-O-methyl uridine
  modified_base 30: mod_base = OTHER; note = 2'-O-methyl adenosine
  modified_base 31: mod_base = OTHER; note = 2'-O-methyl guanosine
  modified_base 32: mod_base = OTHER; note = 2'-O-methyl cytidine
  modified_base 38: mod_base = OTHER; note = 2'-O-methyl uridine
  modified_base 39: mod_base = OTHER; note = 2'-O-methyl uridine phosphorothioate
  modified_base 40: mod_base = OTHER; note = 2'-O-methyl cytidine phosphorothioate
  modified_base 41: mod_base = OTHER; note = 2'-O-methyl uridine phosphorothioate
  modified_base 42: mod_base = OTHER; note = 2'-O-methyl cytidine

SEQ ID NO: 201 - RNA, 42 nt, synthetic construct; identical to SEQ ID NO: 126
  source 1..42: mol_type = other RNA
  modified_base 1: mod_base = OTHER; note = 2'-O-methyl cytidine phosphorothioate
  modified_base 2: mod_base = OTHER; note = 2'-O-methyl uridine phosphorothioate
  modified_base 3: mod_base = OTHER; note = 2'-O-methyl guanosine phosphorothioate
  modified_base 4: mod_base = OTHER; note = 2'-O-methyl adenosine
  modified_base 5: mod_base = OTHER; note = 2'-O-methyl adenosine
  modified_base 9: mod_base = OTHER; note = 2'-O-methyl guanosine
  modified_base 10: mod_base = OTHER; note = 2'-O-methyl uridine
  modified_base 11: mod_base = OTHER; note = 2'-O-methyl guanosine
  modified_base 13: mod_base = OTHER; note = 2'-O-methyl cytidine
  modified_base 16: mod_base = OTHER; note = Uridine phosphorothioate
  modified_base 18: mod_base = OTHER; note = 2'-O-methyl uridine
  modified_base 22: mod_base = OTHER; note = 2'-O-methyl uridine
  modified_base 25: mod_base = OTHER; note = 2'-O-methyl guanosine
  modified_base 29: mod_base = OTHER; note = 2'-O-methyl uridine
  modified_base 30: mod_base = OTHER; note = 2'-O-methyl adenosine
  modified_base 31: mod_base = OTHER; note = 2'-O-methyl guanosine
  modified_base 32: mod_base = OTHER; note = 2'-O-methyl cytidine
  modified_base 38: mod_base = OTHER; note = 2'-O-methyl uridine
  modified_base 39: mod_base = OTHER; note = 2'-O-methyl uridine phosphorothioate
  modified_base 40: mod_base = OTHER; note = 2'-O-methyl cytidine phosphorothioate
  modified_base 41: mod_base = OTHER; note = 2'-O-methyl uridine phosphorothioate
  modified_base 42: mod_base = OTHER; note = 2'-O-methyl cytidine

SEQ ID NO: 202 - RNA, 42 nt, synthetic construct; identical to SEQ ID NO: 126
  source 1..42: mol_type = other RNA
  modified_base 1: mod_base = OTHER; note = 2'-O-methyl cytidine phosphorothioate
  modified_base 2: mod_base = OTHER; note = 2'-O-methyl uridine phosphorothioate
  modified_base 3: mod_base = OTHER; note = 2'-O-methyl guanosine phosphorothioate
  modified_base 4: mod_base = OTHER; note = 2'-O-methyl adenosine
  modified_base 5: mod_base = OTHER; note = 2'-O-methyl adenosine
  modified_base 9: mod_base = OTHER; note = 2'-O-methyl guanosine
  modified_base 10: mod_base = OTHER; note = 2'-O-methyl uridine
  modified_base 11: mod_base = OTHER; note = 2'-O-methyl guanosine
  modified_base 13: mod_base = OTHER; note = 2'-O-methyl cytidine
  modified_base 17: mod_base = OTHER; note = Uridine phosphorothioate
  modified_base 18: mod_base = OTHER; note = 2'-O-methyl uridine
  modified_base 22: mod_base = OTHER; note = 2'-O-methyl uridine
  modified_base 25: mod_base = OTHER; note = 2'-O-methyl guanosine
  modified_base 29: mod_base = OTHER; note = 2'-O-methyl uridine
  modified_base 30: mod_base = OTHER; note = 2'-O-methyl adenosine
  modified_base 31: mod_base = OTHER; note = 2'-O-methyl guanosine
  modified_base 32: mod_base = OTHER; note = 2'-O-methyl cytidine
  modified_base 38: mod_base = OTHER; note = 2'-O-methyl uridine
  modified_base 39: mod_base = OTHER; note = 2'-O-methyl uridine phosphorothioate
  modified_base 40: mod_base = OTHER; note = 2'-O-methyl cytidine phosphorothioate
  modified_base 41: mod_base = OTHER; note = 2'-O-methyl uridine phosphorothioate
  modified_base 42: mod_base = OTHER; note = 2'-O-methyl cytidine

SEQ ID NO: 203 - RNA, 42 nt, synthetic construct; identical to SEQ ID NO: 126
  source 1..42: mol_type = other RNA
  modified_base 1: mod_base = OTHER; note = 2'-O-methyl cytidine phosphorothioate
  modified_base 2: mod_base = OTHER; note = 2'-O-methyl uridine phosphorothioate
  modified_base 3: mod_base = OTHER; note = 2'-O-methyl guanosine phosphorothioate
  modified_base 4: mod_base = OTHER; note = 2'-O-methyl adenosine
  modified_base 5: mod_base = OTHER; note = 2'-O-methyl adenosine
  modified_base 9: mod_base = OTHER; note = 2'-O-methyl guanosine
  modified_base 10: mod_base = OTHER; note = 2'-O-methyl uridine
  modified_base 11: mod_base = OTHER; note = 2'-O-methyl guanosine
  modified_base 13: mod_base = OTHER; note = 2'-O-methyl cytidine
  modified_base 18: mod_base = OTHER; note = 2'-O-methyl uridine
  modified_base 19: mod_base = OTHER; note = Adenosine phosphorothioate
  modified_base 22: mod_base = OTHER; note = 2'-O-methyl uridine
  modified_base 25: mod_base = OTHER; note = 2'-O-methyl guanosine
  modified_base 29: mod_base = OTHER; note = 2'-O-methyl uridine
  modified_base 30: mod_base = OTHER; note = 2'-O-methyl adenosine
  modified_base 31: mod_base = OTHER; note = 2'-O-methyl guanosine
  modified_base 32: mod_base = OTHER; note = 2'-O-methyl cytidine
  modified_base 38: mod_base = OTHER; note = 2'-O-methyl uridine
  modified_base 39: mod_base = OTHER; note = 2'-O-methyl uridine phosphorothioate
  modified_base 40: mod_base = OTHER; note = 2'-O-methyl cytidine phosphorothioate
  modified_base 41: mod_base = OTHER; note = 2'-O-methyl uridine phosphorothioate
  modified_base 42: mod_base = OTHER; note = 2'-O-methyl cytidine

SEQ ID NO: 204 - RNA, 42 nt, synthetic construct; identical to SEQ ID NO: 126
  source 1..42: mol_type = other RNA
  modified_base 1: mod_base = OTHER; note = 2'-O-methyl cytidine phosphorothioate
  modified_base 2: mod_base = OTHER; note = 2'-O-methyl uridine phosphorothioate
  modified_base 3: mod_base = OTHER; note = 2'-O-methyl guanosine phosphorothioate
  modified_base 4: mod_base = OTHER; note = 2'-O-methyl adenosine
  modified_base 5: mod_base = OTHER; note = 2'-O-methyl adenosine
  modified_base 9: mod_base = OTHER; note = 2'-O-methyl guanosine
  modified_base 10: mod_base = OTHER; note = 2'-O-methyl uridine
  modified_base 11: mod_base = OTHER; note = 2'-O-methyl guanosine
  modified_base 13: mod_base = OTHER; note = 2'-O-methyl cytidine
  modified_base 18: mod_base = OTHER; note = 2'-O-methyl uridine
  modified_base 20: mod_base = OTHER; note = Cytidine phosphorothioate
  modified_base 22: mod_base = OTHER; note = 2'-O-methyl uridine
  modified_base 25: mod_base = OTHER; note = 2'-O-methyl guanosine
  modified_base 29: mod_base = OTHER; note = 2'-O-methyl uridine
  modified_base 30: mod_base = OTHER; note = 2'-O-methyl adenosine
  modified_base 31: mod_base = OTHER; note = 2'-O-methyl guanosine
  modified_base 32: mod_base = OTHER; note = 2'-O-methyl cytidine
  modified_base 38: mod_base = OTHER; note = 2'-O-methyl uridine
  modified_base 39: mod_base = OTHER; note = 2'-O-methyl uridine phosphorothioate
  modified_base 40: mod_base = OTHER; note = 2'-O-methyl cytidine phosphorothioate
  modified_base 41: mod_base = OTHER; note = 2'-O-methyl uridine phosphorothioate
  modified_base 42: mod_base = OTHER; note = 2'-O-methyl cytidine

SEQ ID NO: 205 - RNA, 42 nt, synthetic construct; identical to SEQ ID NO: 126
  source 1..42: mol_type = other RNA
  modified_base 1: mod_base = OTHER; note = 2'-O-methyl cytidine phosphorothioate
  modified_base 2: mod_base = OTHER; note = 2'-O-methyl uridine phosphorothioate
  modified_base 3: mod_base = OTHER; note = 2'-O-methyl guanosine phosphorothioate
  modified_base 4: mod_base = OTHER; note = 2'-O-methyl adenosine
  modified_base 5: mod_base = OTHER; note = 2'-O-methyl adenosine
  modified_base 9: mod_base = OTHER; note = 2'-O-methyl guanosine
  modified_base 10: mod_base = OTHER; note = 2'-O-methyl uridine
  modified_base 11: mod_base = OTHER; note = 2'-O-methyl guanosine
  modified_base 13: mod_base = OTHER; note = 2'-O-methyl cytidine
  modified_base 18: mod_base = OTHER; note = 2'-O-methyl uridine
  modified_base 21: mod_base = OTHER; note = Guanosine phosphorothioate
  modified_base 22: mod_base = OTHER; note = 2'-O-methyl uridine
  modified_base 25: mod_base = OTHER; note = 2'-O-methyl guanosine
  modified_base 29: mod_base = OTHER; note = 2'-O-methyl uridine
  modified_base 30: mod_base = OTHER; note = 2'-O-methyl adenosine
  modified_base 31: mod_base = OTHER; note = 2'-O-methyl guanosine
  modified_base 32: mod_base = OTHER; note = 2'-O-methyl cytidine
  modified_base 38: mod_base = OTHER; note = 2'-O-methyl uridine
  modified_base 39: mod_base = OTHER; note = 2'-O-methyl uridine phosphorothioate
  modified_base 40: mod_base = OTHER; note = 2'-O-methyl cytidine phosphorothioate
  modified_base 41: mod_base = OTHER; note = 2'-O-methyl uridine phosphorothioate
  modified_base 42: mod_base = OTHER; note = 2'-O-methyl cytidine

SEQ ID NO: 206 - RNA, 42 nt, synthetic construct; identical to SEQ ID NO: 126
  source 1..42: mol_type = other RNA
  modified_base 1: mod_base = OTHER; note = 2'-O-methyl cytidine phosphorothioate
  modified_base 2: mod_base = OTHER; note = 2'-O-methyl uridine phosphorothioate
  modified_base 3: mod_base = OTHER; note = 2'-O-methyl guanosine phosphorothioate
  modified_base 4: mod_base = OTHER; note = 2'-O-methyl adenosine
  modified_base 5: mod_base = OTHER; note = 2'-O-methyl adenosine
  modified_base 9: mod_base = OTHER; note = 2'-O-methyl guanosine
  modified_base 10: mod_base = OTHER; note = 2'-O-methyl uridine
  modified_base 11: mod_base = OTHER; note = 2'-O-methyl guanosine
  modified_base 13: mod_base = OTHER; note = 2'-O-methyl cytidine
  modified_base 18: mod_base = OTHER; note = 2'-O-methyl uridine
  modified_base 22: mod_base = OTHER; note = 2'-O-methyl uridine
  modified_base 23: mod_base = OTHER; note = Cytidine phosphorothioate
  modified_base 25: mod_base = OTHER; note = 2'-O-methyl guanosine
  modified_base 29: mod_base = OTHER; note = 2'-O-methyl uridine
  modified_base 30: mod_base = OTHER; note = 2'-O-methyl adenosine
  modified_base 31: mod_base = OTHER; note = 2'-O-methyl guanosine
  modified_base 32: mod_base = OTHER; note = 2'-O-methyl cytidine
  modified_base 38: mod_base = OTHER; note = 2'-O-methyl uridine
  modified_base 39: mod_base = OTHER; note = 2'-O-methyl uridine phosphorothioate
  modified_base 40: mod_base = OTHER; note = 2'-O-methyl cytidine phosphorothioate
  modified_base 41: mod_base = OTHER; note = 2'-O-methyl uridine phosphorothioate
  modified_base 42: mod_base = OTHER; note = 2'-O-methyl cytidine

SEQ ID NO: 207 - RNA, 42 nt, synthetic construct; identical to SEQ ID NO: 126
  source 1..42: mol_type = other RNA
  modified_base 1: mod_base = OTHER; note = 2'-O-methyl cytidine phosphorothioate
  modified_base 2: mod_base = OTHER; note = 2'-O-methyl uridine phosphorothioate
  modified_base 3: mod_base = OTHER; note = 2'-O-methyl guanosine phosphorothioate
  modified_base 4: mod_base = OTHER; note = 2'-O-methyl adenosine
  modified_base 5: mod_base = OTHER; note = 2'-O-methyl adenosine
  modified_base 9: mod_base = OTHER; note = 2'-O-methyl guanosine
  modified_base 10: mod_base = OTHER; note = 2'-O-methyl uridine
  modified_base 11: mod_base = OTHER; note = 2'-O-methyl guanosine
  modified_base 13: mod_base = OTHER; note = 2'-O-methyl cytidine
  modified_base 18: mod_base = OTHER; note = 2'-O-methyl uridine
  modified_base 22: mod_base = OTHER; note = 2'-O-methyl uridine
  modified_base 24: mod_base = OTHER; note = Guanosine phosphorothioate
  modified_base 25: mod_base = OTHER; note = 2'-O-methyl guanosine
  modified_base 29: mod_base = OTHER; note = 2'-O-methyl uridine
  modified_base 30: mod_base = OTHER; note = 2'-O-methyl adenosine
  modified_base 31: mod_base = OTHER; note = 2'-O-methyl guanosine
  modified_base 32: mod_base = OTHER; note = 2'-O-methyl cytidine
  modified_base 38: mod_base = OTHER; note = 2'-O-methyl uridine
  modified_base 39: mod_base = OTHER; note = 2'-O-methyl uridine phosphorothioate
  modified_base 40: mod_base = OTHER; note = 2'-O-methyl cytidine phosphorothioate
  modified_base 41: mod_base = OTHER; note = 2'-O-methyl uridine phosphorothioate
  modified_base 42: mod_base = OTHER; note = 2'-O-methyl cytidine

SEQ ID NO: 208 - RNA, 42 nt, synthetic construct; identical to SEQ ID NO: 126
  source 1..42: mol_type = other RNA
  modified_base 1: mod_base = OTHER; note = 2'-O-methyl cytidine phosphorothioate
  modified_base 2: mod_base = OTHER; note = 2'-O-methyl uridine phosphorothioate
  modified_base 3: mod_base = OTHER; note = 2'-O-methyl guanosine phosphorothioate
  modified_base 4: mod_base = OTHER; note = 2'-O-methyl adenosine
  modified_base 5: mod_base = OTHER; note = 2'-O-methyl adenosine
  modified_base 9: mod_base = OTHER; note = 2'-O-methyl guanosine
  modified_base 10: mod_base = OTHER; note = 2'-O-methyl uridine
  modified_base 11: mod_base = OTHER; note = 2'-O-methyl guanosine
  modified_base 13: mod_base = OTHER; note = 2'-O-methyl cytidine
  modified_base 18: mod_base = OTHER; note = 2'-O-methyl uridine
  modified_base 22: mod_base = OTHER; note = 2'-O-methyl uridine
  modified_base 25: mod_base = OTHER; note = 2'-O-methyl guanosine
  modified_base 26: mod_base = OTHER; note = Uridine phosphorothioate
  modified_base 29: mod_base = OTHER; note = 2'-O-methyl uridine
  modified_base 30: mod_base = OTHER; note = 2'-O-methyl adenosine
  modified_base 31: mod_base = OTHER; note = 2'-O-methyl guanosine
  modified_base 32: mod_base = OTHER; note = 2'-O-methyl cytidine
  modified_base 38: mod_base = OTHER; note = 2'-O-methyl uridine
  modified_base 39: mod_base = OTHER; note = 2'-O-methyl uridine phosphorothioate
  modified_base 40: mod_base = OTHER; note = 2'-O-methyl cytidine phosphorothioate
  modified_base 41: mod_base = OTHER; note = 2'-O-methyl uridine phosphorothioate
  modified_base 42: mod_base = OTHER; note = 2'-O-methyl cytidine

SEQ ID NO: 209 - RNA, 42 nt, synthetic construct; identical to SEQ ID NO: 126
  source 1..42: mol_type = other RNA
  modified_base 1: mod_base = OTHER; note = 2'-O-methyl cytidine phosphorothioate
  modified_base 2: mod_base = OTHER; note = 2'-O-methyl uridine phosphorothioate
  modified_base 3: mod_base = OTHER; note = 2'-O-methyl guanosine phosphorothioate
  modified_base 4: mod_base = OTHER; note = 2'-O-methyl adenosine
  modified_base 5: mod_base = OTHER; note = 2'-O-methyl adenosine
  modified_base 9: mod_base = OTHER; note = 2'-O-methyl guanosine
  modified_base 10: mod_base = OTHER; note = 2'-O-methyl uridine
  modified_base 11: mod_base = OTHER; note = 2'-O-methyl guanosine
  modified_base 13: mod_base = OTHER; note = 2'-O-methyl cytidine
  modified_base 18: mod_base = OTHER; note = 2'-O-methyl uridine
  modified_base 22: mod_base = OTHER; note = 2'-O-methyl uridine
  modified_base 25: mod_base = OTHER; note = 2'-O-methyl guanosine
  modified_base 27: mod_base = OTHER; note = Uridine phosphorothioate
  modified_base 29: mod_base = OTHER; note = 2'-O-methyl uridine
  modified_base 30: mod_base = OTHER; note = 2'-O-methyl adenosine
  modified_base 31: mod_base = OTHER; note = 2'-O-methyl guanosine
  modified_base 32: mod_base = OTHER; note = 2'-O-methyl cytidine
  modified_base 38: mod_base = OTHER; note = 2'-O-methyl uridine
  modified_base 39: mod_base = OTHER; note = 2'-O-methyl uridine phosphorothioate
  modified_base 40: mod_base = OTHER; note = 2'-O-methyl cytidine phosphorothioate
  modified_base 41: mod_base = OTHER; note = 2'-O-methyl uridine phosphorothioate
  modified_base 42: mod_base = OTHER; note = 2'-O-methyl cytidine

SEQ ID NO: 210 - RNA, 42 nt, synthetic construct; identical to SEQ ID NO: 126
  source 1..42: mol_type = other RNA
  modified_base 1: mod_base = OTHER; note = 2'-O-methyl cytidine phosphorothioate
  modified_base 2: mod_base = OTHER; note = 2'-O-methyl uridine phosphorothioate
  modified_base 3: mod_base = OTHER; note = 2'-O-methyl guanosine phosphorothioate
  modified_base 4: mod_base = OTHER; note = 2'-O-methyl adenosine
  modified_base 5: mod_base = OTHER; note = 2'-O-methyl adenosine
  modified_base 9: mod_base = OTHER; note = 2'-O-methyl guanosine
  modified_base 10: mod_base = OTHER; note = 2'-O-methyl uridine
  modified_base 11: mod_base = OTHER; note = 2'-O-methyl guanosine
  modified_base 13: mod_base = OTHER; note = 2'-O-methyl cytidine
  modified_base 18: mod_base = OTHER; note = 2'-O-methyl uridine
  modified_base 22: mod_base = OTHER; note = 2'-O-methyl uridine
  modified_base 25: mod_base = OTHER; note = 2'-O-methyl guanosine
  modified_base 28: mod_base = OTHER; note = Guanosine phosphorothioate
  modified_base 29: mod_base = OTHER; note = 2'-O-methyl uridine
  modified_base 30: mod_base = OTHER; note = 2'-O-methyl adenosine
  modified_base 31: mod_base = OTHER; note = 2'-O-methyl guanosine
  modified_base 32: mod_base = OTHER; note = 2'-O-methyl cytidine
  modified_base 38: mod_base = OTHER; note = 2'-O-methyl uridine
  modified_base 39: mod_base = OTHER; note = 2'-O-methyl uridine phosphorothioate
  modified_base 40: mod_base = OTHER; note = 2'-O-methyl cytidine phosphorothioate
  modified_base 41: mod_base = OTHER; note = 2'-O-methyl uridine phosphorothioate
  modified_base 42: mod_base = OTHER; note = 2'-O-methyl cytidine

SEQ ID NO: 211 - RNA, 42 nt, synthetic construct; identical to SEQ ID NO: 126
  source 1..42: mol_type = other RNA
  modified_base 1: mod_base = OTHER; note = 2'-O-methyl cytidine phosphorothioate
  modified_base 2: mod_base = OTHER; note = 2'-O-methyl uridine phosphorothioate
  modified_base 3: mod_base = OTHER; note = 2'-O-methyl guanosine phosphorothioate
  modified_base 4: mod_base = OTHER; note = 2'-O-methyl adenosine
  modified_base 5: mod_base = OTHER; note = 2'-O-methyl adenosine
  modified_base 9: mod_base = OTHER; note = 2'-O-methyl guanosine
  modified_base 10: mod_base = OTHER; note = 2'-O-methyl uridine
  modified_base 11: mod_base = OTHER; note = 2'-O-methyl guanosine
  modified_base 13: mod_base = OTHER; note = 2'-O-methyl cytidine
  modified_base 18: mod_base = OTHER; note = 2'-O-methyl uridine
  modified_base 22: mod_base = OTHER; note = 2'-O-methyl uridine
  modified_base 25: mod_base = OTHER; note = 2'-O-methyl guanosine
  modified_base 29: mod_base = OTHER; note = 2'-O-methyl uridine
  modified_base 30: mod_base = OTHER; note = 2'-O-methyl adenosine
  modified_base 31: mod_base = OTHER; note = 2'-O-methyl guanosine
  modified_base 32: mod_base = OTHER; note = 2'-O-methyl cytidine
  modified_base 33: mod_base = OTHER; note = Uridine phosphorothioate
  modified_base 38: mod_base = OTHER; note = 2'-O-methyl uridine
  modified_base 39: mod_base = OTHER; note = 2'-O-methyl uridine phosphorothioate
  modified_base 40: mod_base = OTHER; note = 2'-O-methyl cytidine phosphorothioate
  modified_base 41: mod_base = OTHER; note = 2'-O-methyl uridine phosphorothioate
  modified_base 42: mod_base = OTHER; note = 2'-O-methyl cytidine

SEQ ID NO: 212 - RNA, 42 nt, synthetic construct; identical to SEQ ID NO: 126
  source 1..42: mol_type = other RNA
  modified_base 1: mod_base = OTHER; note = 2'-O-methyl cytidine phosphorothioate
  modified_base 2: mod_base = OTHER; note = 2'-O-methyl uridine phosphorothioate
  modified_base 3: mod_base = OTHER; note = 2'-O-methyl guanosine phosphorothioate
  modified_base 4: mod_base = OTHER; note = 2'-O-methyl adenosine
  modified_base 5: mod_base = OTHER; note = 2'-O-methyl adenosine
  modified_base 9: mod_base = OTHER; note = 2'-O-methyl guanosine
  modified_base 10: mod_base = OTHER; note = 2'-O-methyl uridine
  modified_base 11: mod_base = OTHER; note = 2'-O-methyl guanosine
  modified_base 13: mod_base = OTHER; note = 2'-O-methyl cytidine
  modified_base 18: mod_base = OTHER; note = 2'-O-methyl uridine
  modified_base 22: mod_base = OTHER; note = 2'-O-methyl uridine
  modified_base 25: mod_base = OTHER; note = 2'-O-methyl guanosine
  modified_base 29: mod_base = OTHER; note = 2'-O-methyl uridine
  modified_base 30: mod_base = OTHER; note = 2'-O-methyl adenosine
  modified_base 31: mod_base = OTHER; note = 2'-O-methyl guanosine
  modified_base 32: mod_base = OTHER; note = 2'-O-methyl cytidine
  modified_base 34: mod_base = OTHER; note = Cytidine phosphorothioate
  modified_base 38: mod_base = OTHER; note = 2'-O-methyl uridine
  modified_base 39: mod_base = OTHER; note = 2'-O-methyl uridine phosphorothioate
  modified_base 40: mod_base = OTHER; note = 2'-O-methyl cytidine phosphorothioate
  modified_base 41: mod_base = OTHER; note = 2'-O-methyl uridine phosphorothioate
  modified_base 42: mod_base = OTHER; note = 2'-O-methyl cytidine

SEQ ID NO: 213 - RNA, 42 nt, synthetic construct; identical to SEQ ID NO: 126
  source 1..42: mol_type = other RNA
  modified_base 1: mod_base = OTHER; note = 2'-O-methyl cytidine phosphorothioate
  modified_base 2: mod_base = OTHER; note = 2'-O-methyl uridine phosphorothioate
  modified_base 3: mod_base = OTHER; note = 2'-O-methyl guanosine phosphorothioate
  modified_base 4: mod_base = OTHER; note = 2'-O-methyl adenosine
  modified_base 5: mod_base = OTHER; note = 2'-O-methyl adenosine
  modified_base 9: mod_base = OTHER; note = 2'-O-methyl guanosine
  modified_base 10: mod_base = OTHER; note = 2'-O-methyl uridine
  modified_base 11: mod_base = OTHER; note = 2'-O-methyl guanosine
  modified_base 13: mod_base = OTHER; note = 2'-O-methyl cytidine
  modified_base 18: mod_base = OTHER; note = 2'-O-methyl uridine
  modified_base 22: mod_base = OTHER; note = 2'-O-methyl uridine
  modified_base 25: mod_base = OTHER; note = 2'-O-methyl guanosine
  modified_base 29: mod_base = OTHER; note = 2'-O-methyl uridine
  modified_base 30: mod_base = OTHER; note = 2'-O-methyl adenosine
  modified_base 31: mod_base = OTHER; note = 2'-O-methyl guanosine
  modified_base 32: mod_base = OTHER; note = 2'-O-methyl cytidine
  modified_base 35: mod_base = OTHER; note = Cytidine phosphorothioate
  modified_base 38: mod_base = OTHER; note = 2'-O-methyl uridine
  modified_base 39: mod_base = OTHER; note = 2'-O-methyl uridine phosphorothioate
  modified_base 40: mod_base = OTHER; note = 2'-O-methyl cytidine phosphorothioate
  modified_base 41: mod_base = OTHER; note = 2'-O-methyl uridine phosphorothioate
  modified_base 42: mod_base = OTHER; note = 2'-O-methyl cytidine

SEQ ID NO: 214 - RNA, 42 nt, synthetic construct; identical to SEQ ID NO: 126
  source 1..42: mol_type = other RNA
  modified_base 1: mod_base = OTHER; note = 2'-O-methyl cytidine phosphorothioate
  modified_base 2: mod_base = OTHER; note = 2'-O-methyl uridine phosphorothioate
  modified_base 3: mod_base = OTHER; note = 2'-O-methyl guanosine phosphorothioate
  modified_base 4: mod_base = OTHER; note = 2'-O-methyl adenosine
  modified_base 5: mod_base = OTHER; note = 2'-O-methyl adenosine
  modified_base 9: mod_base = OTHER; note = 2'-O-methyl guanosine
  modified_base 10: mod_base = OTHER; note = 2'-O-methyl uridine
  modified_base 11: mod_base = OTHER; note = 2'-O-methyl guanosine
  modified_base 13: mod_base = OTHER; note = 2'-O-methyl cytidine
  modified_base 18: mod_base = OTHER; note = 2'-O-methyl uridine
  modified_base 22: mod_base = OTHER; note = 2'-O-methyl uridine
  modified_base 25: mod_base = OTHER; note = 2'-O-methyl guanosine
  modified_base 29: mod_base = OTHER; note = 2'-O-methyl uridine
  modified_base 30: mod_base = OTHER; note = 2'-O-methyl adenosine
  modified_base 31: mod_base = OTHER; note = 2'-O-methyl guanosine
  modified_base 32: mod_base = OTHER; note = 2'-O-methyl cytidine
  modified_base 36: mod_base = OTHER; note = Cytidine phosphorothioate
  modified_base 38: mod_base = OTHER; note = 2'-O-methyl uridine
  modified_base 39: mod_base = OTHER; note = 2'-O-methyl uridine phosphorothioate
  modified_base 40: mod_base = OTHER; note = 2'-O-methyl cytidine phosphorothioate
  modified_base 41: mod_base = OTHER; note = 2'-O-methyl uridine phosphorothioate
  modified_base 42: mod_base = OTHER; note = 2'-O-methyl cytidine

SEQ ID NO: 215 - RNA, 42 nt, synthetic construct; identical to SEQ ID NO: 126
  source 1..42: mol_type = other RNA
  modified_base 1: mod_base = OTHER; note = 2'-O-methyl cytidine phosphorothioate
  modified_base 2: mod_base = OTHER; note = 2'-O-methyl uridine phosphorothioate
  modified_base 3: mod_base = OTHER; note = 2'-O-methyl guanosine phosphorothioate
  modified_base 4: mod_base = OTHER; note = 2'-O-methyl adenosine
  modified_base 5: mod_base = OTHER; note = 2'-O-methyl adenosine
  modified_base 9: mod_base = OTHER; note = 2'-O-methyl guanosine
  modified_base 10: mod_base = OTHER; note = 2'-O-methyl uridine
  modified_base 11: mod_base = OTHER; note = 2'-O-methyl guanosine
  modified_base 13: mod_base = OTHER; note = 2'-O-methyl cytidine
  modified_base 18: mod_base = OTHER; note = 2'-O-methyl uridine
  modified_base 22: mod_base = OTHER; note = 2'-O-methyl uridine
  modified_base 25: mod_base = OTHER; note = 2'-O-methyl guanosine
  modified_base 29: mod_base = OTHER; note = 2'-O-methyl uridine
  modified_base 30: mod_base = OTHER; note = 2'-O-methyl adenosine
  modified_base 31: mod_base = OTHER; note = 2'-O-methyl guanosine
  modified_base 32: mod_base = OTHER; note = 2'-O-methyl cytidine
  modified_base 37: mod_base = OTHER; note = Uridine phosphorothioate
  modified_base 38: mod_base = OTHER; note = 2'-O-methyl uridine
  modified_base 39: mod_base = OTHER; note = 2'-O-methyl uridine phosphorothioate
  modified_base 40: mod_base = OTHER; note = 2'-O-methyl cytidine phosphorothioate
  modified_base 41: mod_base = OTHER; note = 2'-O-methyl uridine phosphorothioate
  modified_base 42: mod_base = OTHER; note = 2'-O-methyl cytidine

SEQ ID NO: 216 - DNA, 42 bp, synthetic construct; identical to SEQ ID NO: 174
  source 1..42: mol_type = other DNA
  modified_base 1: mod_base = OTHER; note = 2'-O-methyl cytidine phosphorothioate
  modified_base 2: mod_base = OTHER; note = 2'-O-methyl uridine phosphorothioate
  modified_base 3: mod_base = OTHER; note = 2'-O-methyl guanosine phosphorothioate
  modified_base 4: mod_base = OTHER; note = 2'-O-methyl adenosine
  modified_base 5: mod_base = OTHER; note = 2'-O-methyl adenosine
  modified_base 9: mod_base = OTHER; note = 2'-O-methyl guanosine
  modified_base 10: mod_base = OTHER; note = 2'-O-methyl uridine
  modified_base 11: mod_base = OTHER; note = 2'-O-methyl guanosine
  modified_base 12: mod_base = OTHER; note = 2'-O-methyl guanosine
  modified_base 13: mod_base = OTHER; note = 2'-O-methyl cytidine
  modified_base 14: mod_base = OTHER; note = 2'-O-methyl cytidine
  modified_base 18: mod_base = OTHER; note = 2'-O-methyl uridine
  modified_base 22: mod_base = OTHER; note = 2'-O-methyl uridine
  modified_base 25: mod_base = OTHER; note = 2'-O-methyl guanosine
  modified_base 29: mod_base = OTHER; note = 2'-O-methyl uridine
  modified_base 30: mod_base = OTHER; note = 2'-O-methyl adenosine
  modified_base 31: mod_base = OTHER; note = 2'-O-methyl guanosine
  modified_base 32: mod_base = OTHER; note = 2'-O-methyl cytidine
  modified_base 38: mod_base = OTHER; note = 2'-O-methyl uridine
  modified_base 39: mod_base = OTHER; note = 2'-O-methyl uridine phosphorothioate
  modified_base 40: mod_base = OTHER; note = 2'-O-methyl cytidine phosphorothioate
  modified_base 41: mod_base = OTHER; note = 2'-O-methyl uridine phosphorothioate
  modified_base 42: mod_base = OTHER; note = 2'-O-methyl cytidine
  misc_feature 1..5: note = RNA
  misc_feature 6..8: note = DNA
  misc_feature 9..42: note = RNA

SEQ ID NO: 217 - RNA, 42 nt, synthetic construct; identical to SEQ ID NO: 126
  source 1..42: mol_type = other RNA
  modified_base 1: mod_base = OTHER; note = 2'-O-methyl cytidine phosphorothioate
  modified_base 2: mod_base = OTHER; note = 2'-O-methyl uridine phosphorothioate
  modified_base 3: mod_base = OTHER; note = 2'-O-methyl guanosine phosphorothioate
  modified_base 4: mod_base = OTHER; note = 2'-O-methyl adenosine
  modified_base 5: mod_base = OTHER; note = 2'-O-methyl adenosine
  modified_base 6: mod_base = OTHER; note = Cytidine phosphorothioate
  modified_base 7: mod_base = OTHER; note = Uridine phosphorothioate
  modified_base 8: mod_base = OTHER; note = Uridine phosphorothioate
  modified_base 9: mod_base = OTHER; note = 2'-O-methyl guanosine
  modified_base 10: mod_base = OTHER; note = 2'-O-methyl uridine
  modified_base 11: mod_base = OTHER; note = 2'-O-methyl guanosine
  modified_base 12: mod_base = OTHER; note = 2'-O-methyl guanosine
  modified_base 13: mod_base = OTHER; note = 2'-O-methyl cytidine
  modified_base 14: mod_base = OTHER; note = 2'-O-methyl cytidine
  modified_base 18: mod_base = OTHER; note = 2'-O-methyl uridine
  modified_base 22: mod_base = OTHER; note = 2'-O-methyl uridine
  modified_base 25: mod_base = OTHER; note = 2'-O-methyl guanosine
  modified_base 29: mod_base = OTHER; note = 2'-O-methyl uridine
  modified_base 30: mod_base = OTHER; note = 2'-O-methyl adenosine
  modified_base 31: mod_base = OTHER; note = 2'-O-methyl guanosine
  modified_base 32: mod_base = OTHER; note = 2'-O-methyl cytidine
  modified_base 38: mod_base = OTHER; note = 2'-O-methyl uridine
  modified_base 39: mod_base = OTHER; note = 2'-O-methyl uridine phosphorothioate
  modified_base 40: mod_base = OTHER; note = 2'-O-methyl cytidine phosphorothioate
  modified_base 41: mod_base = OTHER; note = 2'-O-methyl uridine phosphorothioate
  modified_base 42: mod_base = OTHER; note = 2'-O-methyl cytidine

SEQ ID NO: 218 - DNA, 42 bp, synthetic construct; identical to SEQ ID NO: 174
  source 1..42: mol_type = other DNA
  modified_base 1: mod_base = OTHER; note = 2'-O-methyl cytidine phosphorothioate
  modified_base 2: mod_base = OTHER; note = 2'-O-methyl uridine phosphorothioate
  modified_base 3: mod_base = OTHER; note = 2'-O-methyl guanosine phosphorothioate
  modified_base 4: mod_base = OTHER; note = 2'-O-methyl adenosine
  modified_base 5: mod_base = OTHER; note = 2'-O-methyl adenosine
  modified_base 6: mod_base = OTHER; note = Deoxycytidine phosphorothioate
  modified_base 7: mod_base = OTHER; note = Deoxythymidine phosphorothioate
  modified_base 8: mod_base = OTHER; note = Deoxythymidine phosphorothioate
  modified_base 9: mod_base = OTHER; note = 2'-O-methyl guanosine
  modified_base 10: mod_base = OTHER; note = 2'-O-methyl uridine
  modified_base 11: mod_base = OTHER; note = 2'-O-methyl guanosine
  modified_base 12: mod_base = OTHER; note = 2'-O-methyl guanosine
  modified_base 13: mod_base = OTHER; note = 2'-O-methyl cytidine
  modified_base 14: mod_base = OTHER; note = 2'-O-methyl cytidine
  modified_base 18: mod_base = OTHER; note = 2'-O-methyl uridine
  modified_base 22: mod_base = OTHER; note = 2'-O-methyl uridine
  modified_base 25: mod_base = OTHER; note = 2'-O-methyl guanosine
  modified_base 29: mod_base = OTHER; note = 2'-O-methyl uridine
  modified_base 30: mod_base = OTHER; note = 2'-O-methyl adenosine
  modified_base 31: mod_base = OTHER; note = 2'-O-methyl guanosine
  modified_base 32: mod_base = OTHER; note = 2'-O-methyl cytidine
  modified_base 38: mod_base = OTHER; note = 2'-O-methyl uridine
  modified_base 39: mod_base = OTHER; note = 2'-O-methyl uridine phosphorothioate
  modified_base 40: mod_base = OTHER; note = 2'-O-methyl cytidine phosphorothioate
  modified_base 41: mod_base = OTHER; note = 2'-O-methyl uridine phosphorothioate
  modified_base 42: mod_base = OTHER; note = 2'-O-methyl cytidine
  misc_feature 1..5: note = RNA
  misc_feature 6..8: note = DNA
  misc_feature 9..42: note = RNA

SEQ ID NO: 219 - RNA, 42 nt, synthetic construct; identical to SEQ ID NO: 126
  source 1..42: mol_type = other RNA
  modified_base 1: mod_base = OTHER; note = 2'-O-methyl cytidine phosphorothioate
  modified_base 2: mod_base = OTHER; note = 2'-O-methyl uridine
  modified_base 3: mod_base = OTHER; note = 2'-O-methyl guanosine
  modified_base 4: mod_base = OTHER; note = 2'-O-methyl adenosine
  modified_base 5: mod_base = OTHER; note = 2'-O-methyl adenosine
  modified_base 9: mod_base = OTHER; note = 2'-O-methyl guanosine
  modified_base 10: mod_base = OTHER; note = 2'-O-methyl uridine phosphorothioate
  modified_base 11: mod_base = OTHER; note = 2'-O-methyl guanosine
  modified_base 13: mod_base = OTHER; note = 2'-O-methyl cytidine
  modified_base 14: mod_base = OTHER; note = Cytidine phosphorothioate
  modified_base 18: mod_base = OTHER; note = 2'-O-methyl uridine
  modified_base 22: mod_base = OTHER; note = 2'-O-methyl uridine
  modified_base 24: mod_base = OTHER; note = Guanosine phosphorothioate
  modified_base 25: mod_base = OTHER; note = 2'-O-methyl guanosine
  modified_base 29: mod_base = OTHER; note = 2'-O-methyl uridine phosphorothioate
  modified_base 30: mod_base = OTHER; note = 2'-O-methyl adenosine phosphorothioate
  modified_base 31: mod_base = OTHER; note = 2'-O-methyl guanosine phosphorothioate
  modified_base 32: mod_base = OTHER; note = 2'-O-methyl cytidine phosphorothioate
  modified_base 33: mod_base = OTHER; note = Uridine phosphorothioate
  modified_base 34: mod_base = OTHER; note = Cytidine phosphorothioate
  modified_base 36: mod_base = OTHER; note = Cytidine phosphorothioate
  modified_base 37: mod_base = OTHER; note = Uridine phosphorothioate
  modified_base 38: mod_base = OTHER; note = 2'-O-methyl uridine phosphorothioate
  modified_base 39: mod_base = OTHER; note = 2'-O-methyl uridine phosphorothioate
  modified_base 40: mod_base = OTHER; note = 2'-O-methyl cytidine phosphorothioate
  modified_base 41: mod_base = OTHER; note = 2'-O-methyl uridine phosphorothioate
  modified_base 42: mod_base = OTHER; note = 2'-O-methyl cytidine

SEQ ID NO: 220 - RNA, 42 nt, synthetic construct; identical to SEQ ID NO: 126
  source 1..42: mol_type = other RNA
  modified_base 1: mod_base = OTHER; note = 2'-O-methyl cytidine phosphorothioate
  modified_base 2: mod_base = OTHER; note = 2'-O-methyl uridine phosphorothioate
  modified_base 3: mod_base = OTHER; note = 2'-O-methyl guanosine phosphorothioate
  modified_base 4: mod_base = OTHER; note = 2'-O-methyl adenosine
  modified_base 5: mod_base = OTHER; note = 2'-O-methyl adenosine
  modified_base 9: mod_base = OTHER; note = 2'-O-methyl guanosine
  modified_base 10: mod_base = OTHER; note = 2'-O-methyl uridine phosphorothioate
  modified_base 11: mod_base = OTHER; note = 2'-O-methyl guanosine
  modified_base 13: mod_base = OTHER; note = 2'-O-methyl cytidine
  modified_base 14: mod_base = OTHER; note = Cytidine phosphorothioate
  modified_base 18: mod_base = OTHER; note = 2'-O-methyl uridine
  modified_base 22: mod_base = OTHER; note = 2'-O-methyl uridine
  modified_base 24: mod_base = OTHER; note = Guanosine phosphorothioate
  modified_base 25: mod_base = OTHER; note = 2'-O-methyl guanosine
  modified_base 29: mod_base = OTHER; note = 2'-O-methyl uridine phosphorothioate
  modified_base 30: mod_base = OTHER; note = 2'-O-methyl adenosine phosphorothioate
  modified_base 31: mod_base = OTHER; note = 2'-O-methyl guanosine phosphorothioate
  modified_base 32: mod_base = OTHER; note = 2'-O-methyl cytidine phosphorothioate
  modified_base 33: mod_base = OTHER; note = Uridine phosphorothioate
  modified_base 34: mod_base = OTHER; note = Cytidine phosphorothioate
  modified_base 36: mod_base = OTHER; note = Cytidine phosphorothioate
  modified_base 37: mod_base = OTHER; note = Uridine phosphorothioate
  modified_base 38: mod_base = OTHER; note = 2'-O-methyl uridine phosphorothioate
  modified_base 39: mod_base = OTHER; note = 2'-O-methyl uridine phosphorothioate
  modified_base 40: mod_base = OTHER; note = 2'-O-methyl cytidine phosphorothioate
  modified_base 41: mod_base = OTHER; note = 2'-O-methyl uridine phosphorothioate
  modified_base 42: mod_base = OTHER; note = 2'-O-methyl cytidine

SEQ ID NO: 221 - RNA, 42 nt, synthetic construct; identical to SEQ ID NO: 126
  source 1..42: mol_type = other RNA
  modified_base 1: mod_base = OTHER; note = 2'-O-methyl cytidine phosphorothioate
  modified_base 2: mod_base = OTHER; note = 2'-O-methyl uridine phosphorothioate
  modified_base 3: mod_base = OTHER; note = 2'-O-methyl guanosine phosphorothioate
  modified_base 4: mod_base = OTHER; note = 2'-O-methyl adenosine
  modified_base 5: mod_base = OTHER; note = 2'-O-methyl adenosine
  modified_base 6: mod_base = OTHER; note = Cytidine phosphorothioate
  modified_base 7: mod_base = OTHER; note = Uridine phosphorothioate
  modified_base 8: mod_base = OTHER; note = Uridine phosphorothioate
  modified_base 9: mod_base = OTHER; note = 2'-O-methyl guanosine
  modified_base 10: mod_base = OTHER; note = 2'-O-methyl uridine phosphorothioate
  modified_base 11: mod_base = OTHER; note = 2'-O-methyl guanosine
  modified_base 13: mod_base = OTHER; note = 2'-O-methyl cytidine
  modified_base 14: mod_base = OTHER; note = Cytidine phosphorothioate
  modified_base 18: mod_base = OTHER; note = 2'-O-methyl uridine
  modified_base 22: mod_base = OTHER; note = 2'-O-methyl uridine
  modified_base 24: mod_base = OTHER; note = Guanosine phosphorothioate
  modified_base 25: mod_base = OTHER; note = 2'-O-methyl guanosine
  modified_base 29: mod_base = OTHER; note = 2'-O-methyl uridine phosphorothioate
  modified_base 30: mod_base = OTHER; note = 2'-O-methyl adenosine phosphorothioate
  modified_base 31: mod_base = OTHER; note = 2'-O-methyl guanosine phosphorothioate
  modified_base 32: mod_base = OTHER; note = 2'-O-methyl cytidine phosphorothioate
  modified_base 33: mod_base = OTHER; note = Uridine phosphorothioate
  modified_base 34: mod_base = OTHER; note = Cytidine phosphorothioate
  modified_base 36: mod_base = OTHER; note = Cytidine phosphorothioate
  modified_base 37: mod_base = OTHER; note = Uridine phosphorothioate
  modified_base 38: mod_base = OTHER; note = 2'-O-methyl uridine phosphorothioate
  modified_base 39: mod_base = OTHER; note = 2'-O-methyl uridine phosphorothioate
  modified_base 40: mod_base = OTHER; note = 2'-O-methyl cytidine phosphorothioate
  modified_base 41: mod_base = OTHER; note = 2'-O-methyl uridine phosphorothioate
  modified_base 42: mod_base = OTHER; note = 2'-O-methyl cytidine

SEQ ID NO: 222 - DNA, 42 bp, synthetic construct; identical to SEQ ID NO: 174
  source 1..42: mol_type = other DNA
  modified_base 1: mod_base = OTHER; note = 2'-O-methyl cytidine phosphorothioate
  modified_base 2: mod_base = OTHER; note = 2'-O-methyl uridine phosphorothioate
  modified_base 3: mod_base = OTHER; note = 2'-O-methyl guanosine phosphorothioate
  modified_base 4: mod_base = OTHER; note = 2'-O-methyl adenosine
  modified_base 5: mod_base = OTHER; note = 2'-O-methyl adenosine
  modified_base 9: mod_base = OTHER; note = 2'-O-methyl guanosine
  modified_base 10: mod_base = OTHER; note = 2'-O-methyl uridine
  modified_base 11: mod_base = OTHER; note = 2'-O-methyl guanosine
  modified_base 13: mod_base = OTHER; note = 2'-O-methyl cytidine
  modified_base 18: mod_base = OTHER; note = 2'-O-methyl uridine
  modified_base 22: mod_base = OTHER; note = 2'-O-methyl uridine
  modified_base 25: mod_base = OTHER; note = 2'-O-methyl guanosine
  modified_base 26: mod_base = OTHER; note = Deoxyuridine phosphorothioate
  modified_base 27: mod_base = OTHER; note = Deoxyuridine phosphorothioate
  modified_base 28: mod_base = OTHER; note = 2'-O-methyl guanosine
  modified_base 29: mod_base = OTHER; note = 2'-O-methyl uridine
  modified_base 30: mod_base = OTHER; note = 2'-O-methyl adenosine
  modified_base 31: mod_base = OTHER; note = 2'-O-methyl guanosine
  modified_base 32: mod_base = OTHER; note = 2'-O-methyl cytidine
  modified_base 38: mod_base = OTHER; note = 2'-O-methyl uridine
  modified_base 39: mod_base = OTHER; note = 2'-O-methyl uridine phosphorothioate
  modified_base 40: mod_base = OTHER; note = 2'-O-methyl cytidine phosphorothioate
  modified_base 41: mod_base = OTHER; note = 2'-O-methyl uridine phosphorothioate
  modified_base 42: mod_base = OTHER; note = 2'-O-methyl cytidine
  misc_feature 1..25: note = RNA
  misc_feature 26..27: note = DNA
  misc_feature 28..42: note = RNA

SEQ ID NO: 223 - DNA, 42 bp, synthetic construct; identical to SEQ ID NO: 174
  source 1..42: mol_type = other DNA
  modified_base 1: mod_base = OTHER; note = 2'-O-methyl cytidine phosphorothioate
  modified_base 2: mod_base = OTHER; note = 2'-O-methyl uridine phosphorothioate
  modified_base 3: mod_base = OTHER; note = 2'-O-methyl guanosine phosphorothioate
  modified_base 4: mod_base = OTHER; note = 2'-O-methyl adenosine
  modified_base 5: mod_base = OTHER; note = 2'-O-methyl adenosine
  modified_base 9: mod_base = OTHER; note = 2'-O-methyl guanosine
  modified_base 10: mod_base = OTHER; note = 2'-O-methyl uridine
  modified_base 11: mod_base = OTHER; note = 2'-O-methyl guanosine
  modified_base 13: mod_base = OTHER; note = 2'-O-methyl cytidine
  modified_base 18: mod_base = OTHER; note = 2'-O-methyl uridine
  modified_base 22: mod_base = OTHER; note = 2'-O-methyl uridine
  modified_base 25: mod_base = OTHER; note = 2'-O-methyl guanosine
  modified_base 26: mod_base = OTHER; note = Deoxyuridine phosphorothioate
  modified_base 27: mod_base = OTHER; note = Deoxyuridine phosphorothioate
  modified_base 28: mod_base = OTHER; note = Deoxyguanosine phosphorothioate
  modified_base 29: mod_base = OTHER; note = 2'-O-methyl uridine
  modified_base 30: mod_base = OTHER; note = 2'-O-methyl adenosine
  modified_base 31: mod_base = OTHER; note = 2'-O-methyl guanosine
  modified_base 32: mod_base = OTHER; note = 2'-O-methyl cytidine
  modified_base 38: mod_base = OTHER; note = 2'-O-methyl uridine
  modified_base 39: mod_base = OTHER; note = 2'-O-methyl uridine phosphorothioate
  modified_base 40: mod_base = OTHER; note = 2'-O-methyl cytidine phosphorothioate
  modified_base 41: mod_base = OTHER; note = 2'-O-methyl uridine phosphorothioate
  modified_base 42: mod_base = OTHER; note = 2'-O-methyl cytidine
  misc_feature 1..25: note = RNA
  misc_feature 26..28: note = DNA
  misc_feature 29..42: note = RNA

SEQ ID NO: 224 - DNA, 42 bp, synthetic construct; identical to SEQ ID NO: 174
  source 1..42: mol_type = other DNA
  modified_base 1: mod_base = OTHER; note = 2'-O-methyl cytidine phosphorothioate
  modified_base 2: mod_base = OTHER; note = 2'-O-methyl uridine phosphorothioate
  modified_base 3: mod_base = OTHER; note = 2'-O-methyl guanosine phosphorothioate
  modified_base 4: mod_base = OTHER; note = 2'-O-methyl adenosine
  modified_base 5: mod_base = OTHER; note = 2'-O-methyl adenosine
  modified_base 9: mod_base = OTHER; note = 2'-O-methyl guanosine
  modified_base 10: mod_base = OTHER; note = 2'-O-methyl uridine
  modified_base 11: mod_base = OTHER; note = 2'-O-methyl guanosine
  modified_base 13: mod_base = OTHER; note = 2'-O-methyl cytidine
  modified_base 18: mod_base = OTHER; note = 2'-O-methyl uridine
  modified_base 22: mod_base = OTHER; note = 2'-O-methyl uridine
  modified_base 25: mod_base = OTHER; note = 2'-O-methyl guanosine
  modified_base 29: mod_base = OTHER; note = 2'-O-methyl uridine
  modified_base 30: mod_base = OTHER; note = 2'-O-methyl adenosine
  modified_base 31: mod_base = OTHER; note = 2'-O-methyl guanosine
  modified_base 32: mod_base = OTHER; note = 2'-O-methyl cytidine
  modified_base 33: mod_base = OTHER; note = Deoxyuridine phosphorothioate
  modified_base 34: mod_base = OTHER; note = Deoxycytidine phosphorothioate
  modified_base 35: mod_base = OTHER; note = Deoxycytidine phosphorothioate
  modified_base 37: mod_base = OTHER; note = Deoxyuridine phosphorothioate
  modified_base 38: mod_base = OTHER; note = 2'-O-methyl uridine
  modified_base 39: mod_base = OTHER; note = 2'-O-methyl uridine phosphorothioate
  modified_base 40: mod_base = OTHER; note = 2'-O-methyl cytidine phosphorothioate
  modified_base 41: mod_base = OTHER; note = 2'-O-methyl uridine phosphorothioate
  modified_base 42: mod_base = OTHER; note = 2'-O-methyl cytidine
  misc_feature 1..32: note = RNA
  misc_feature 33..35: note = DNA
  misc_feature 36: note = RNA
  misc_feature 37: note = DNA
  misc_feature 38..42: note = RNA

SEQ ID NO: 225 - DNA, 42 bp, synthetic construct; identical to SEQ ID NO: 174
  source 1..42: mol_type = other DNA
  modified_base 1: mod_base = OTHER; note = 2'-O-methyl cytidine phosphorothioate
  modified_base 2: mod_base = OTHER; note = 2'-O-methyl uridine phosphorothioate
  modified_base 3: mod_base = OTHER; note = 2'-O-methyl guanosine phosphorothioate
  modified_base 4: mod_base = OTHER; note = 2'-O-methyl adenosine
  modified_base 5: mod_base = OTHER; note = 2'-O-methyl adenosine
  modified_base 9: mod_base = OTHER; note = 2'-O-methyl guanosine
  modified_base 10: mod_base = OTHER; note = 2'-O-methyl uridine
  modified_base 11: mod_base = OTHER; note = 2'-O-methyl guanosine
  modified_base 13: mod_base = OTHER; note = 2'-O-methyl cytidine
  modified_base 18: mod_base = OTHER; note = 2'-O-methyl uridine
  modified_base 22: mod_base = OTHER; note = 2'-O-methyl uridine
  modified_base 25: mod_base = OTHER; note = 2'-O-methyl guanosine
  modified_base 29: mod_base = OTHER; note = 2'-O-methyl uridine
  modified_base 30: mod_base = OTHER; note = 2'-O-methyl adenosine
  modified_base 31: mod_base = OTHER; note = 2'-O-methyl guanosine
  modified_base 32: mod_base = OTHER; note = 2'-O-methyl cytidine
  modified_base 33: mod_base = OTHER; note = Deoxyuridine phosphorothioate
  modified_base 34: mod_base = OTHER; note = Deoxycytidine phosphorothioate
  modified_base 35: mod_base = OTHER; note = Deoxycytidine phosphorothioate
  modified_base 36: mod_base = OTHER; note = 2'-O-methyl cytidine
  modified_base 37: mod_base = OTHER; note = Deoxyuridine phosphorothioate
  modified_base 38: mod_base = OTHER; note = 2'-O-methyl uridine
  modified_base 39: mod_base = OTHER; note = 2'-O-methyl uridine phosphorothioate
  modified_base 40: mod_base = OTHER; note = 2'-O-methyl cytidine phosphorothioate
  modified_base 41: mod_base = OTHER; note = 2'-O-methyl uridine phosphorothioate
  modified_base 42: mod_base = OTHER; note = 2'-O-methyl cytidine
  misc_feature 1..32: note = RNA
  misc_feature 33..35: note = DNA
  misc_feature 36: note = RNA
  misc_feature 37: note = DNA
  misc_feature 38..42: note = RNA

SEQ ID NO: 226 - DNA, 42 bp, synthetic construct; identical to SEQ ID NO: 174
  source 1..42: mol_type = other DNA
  modified_base 1: mod_base = OTHER; note = 2'-O-methyl cytidine phosphorothioate
  modified_base 2: mod_base = OTHER; note = 2'-O-methyl uridine phosphorothioate
  modified_base 3: mod_base = OTHER; note = 2'-O-methyl guanosine phosphorothioate
  modified_base 4: mod_base = OTHER; note = 2'-O-methyl adenosine
  modified_base 5: mod_base = OTHER; note = 2'-O-methyl adenosine
  modified_base 9: mod_base = OTHER; note = 2'-O-methyl guanosine
  modified_base 10: mod_base = OTHER; note = 2'-O-methyl uridine
  modified_base 11: mod_base = OTHER; note = 2'-O-methyl guanosine
  modified_base 13: mod_base = OTHER; note = 2'-O-methyl cytidine
  modified_base 18: mod_base = OTHER; note = 2'-O-methyl uridine
  modified_base 22: mod_base = OTHER; note = 2'-O-methyl uridine
  modified_base 25: mod_base = OTHER; note = 2'-O-methyl guanosine
  modified_base 29: mod_base = OTHER; note = 2'-O-methyl uridine
  modified_base 30: mod_base = OTHER; note = 2'-O-methyl adenosine
  modified_base 31: mod_base = OTHER; note = 2'-O-methyl guanosine
  modified_base 32: mod_base = OTHER; note = 2'-O-methyl cytidine
  modified_base 33: mod_base = OTHER; note = 2'-O-methyl uridine
  modified_base 34: mod_base = OTHER; note = Deoxycytidine phosphorothioate
  modified_base 35: mod_base = OTHER; note = Deoxycytidine phosphorothioate
  modified_base 37: mod_base = OTHER; note = Deoxyuridine phosphorothioate
  modified_base 38: mod_base = OTHER; note = 2'-O-methyl uridine
  modified_base 39: mod_base = OTHER; note = 2'-O-methyl uridine phosphorothioate
  modified_base 40: mod_base = OTHER; note = 2'-O-methyl cytidine phosphorothioate
  modified_base 41: mod_base = OTHER; note = 2'-O-methyl uridine phosphorothioate
  modified_base 42: mod_base = OTHER; note = 2'-O-methyl cytidine
  misc_feature 1..33: note = RNA
  misc_feature 34..35: note = DNA
  misc_feature 36: note = RNA
  misc_feature 37: note = DNA
  misc_feature 38..42: note = RNA

SEQ ID NO: 227 - DNA, 42 bp, synthetic construct; identical to SEQ ID NO: 174
  source 1..42: mol_type = other DNA
  modified_base 1: mod_base = OTHER; note = 2'-O-methyl cytidine phosphorothioate
  modified_base 2: mod_base = OTHER; note = 2'-O-methyl uridine phosphorothioate
  modified_base 3: mod_base = OTHER; note = 2'-O-methyl guanosine phosphorothioate
  modified_base 4: mod_base = OTHER; note = 2'-O-methyl adenosine
  modified_base 5: mod_base = OTHER; note = 2'-O-methyl adenosine
  modified_base 9: mod_base = OTHER; note = 2'-O-methyl guanosine
  modified_base 10: mod_base = OTHER; note = 2'-O-methyl uridine
  modified_base 11: mod_base = OTHER; note = 2'-O-methyl guanosine
  modified_base 13: mod_base = OTHER; note = 2'-O-methyl cytidine
  modified_base 18: mod_base = OTHER; note = 2'-O-methyl uridine
  modified_base 22: mod_base = OTHER; note = 2'-O-methyl uridine
  modified_base 25: mod_base = OTHER; note = 2'-O-methyl guanosine
  modified_base 29: mod_base = OTHER; note = 2'-O-methyl uridine
  modified_base 30: mod_base = OTHER; note = 2'-O-methyl adenosine
  modified_base 31: mod_base = OTHER; note = 2'-O-methyl guanosine
  modified_base 32: mod_base = OTHER; note = 2'-O-methyl cytidine
  modified_base 33: mod_base = OTHER; note = Deoxyuridine phosphorothioate
  modified_base 34: mod_base = OTHER; note = 2'-O-methyl cytidine
  modified_base 35: mod_base = OTHER; note = Deoxycytidine phosphorothioate
  modified_base 37: mod_base = OTHER; note = Deoxyuridine phosphorothioate
  modified_base 38: mod_base = OTHER; note = 2'-O-methyl uridine
  modified_base 39: mod_base = OTHER; note = 2'-O-methyl uridine phosphorothioate
  modified_base 40: mod_base = OTHER; note = 2'-O-methyl cytidine phosphorothioate
  modified_base 41: mod_base = OTHER; note = 2'-O-methyl uridine phosphorothioate
  modified_base 42: mod_base = OTHER; note = 2'-O-methyl cytidine
  misc_feature 1..32: note = RNA
  misc_feature 33: note = DNA
  misc_feature 34: note = RNA
  misc_feature 35: note = DNA
  misc_feature 36: note = RNA
  misc_feature 37: note = DNA
  misc_feature 38..42: note = RNA

SEQ ID NO: 228 - DNA, 42 bp, synthetic construct; identical to SEQ ID NO: 174
  source 1..42: mol_type = other DNA
  modified_base 1: mod_base = OTHER; note = 2'-O-methyl cytidine phosphorothioate
  modified_base 2: mod_base = OTHER; note = 2'-O-methyl uridine phosphorothioate
  modified_base 3: mod_base = OTHER; note = 2'-O-methyl guanosine phosphorothioate
  modified_base 4: mod_base = OTHER; note = 2'-O-methyl adenosine
  modified_base 5: mod_base = OTHER; note = 2'-O-methyl adenosine
  modified_base 9: mod_base = OTHER; note = 2'-O-methyl guanosine
  modified_base 10: mod_base = OTHER; note = 2'-O-methyl uridine
  modified_base 11: mod_base = OTHER; note = 2'-O-methyl guanosine
  modified_base 13: mod_base = OTHER; note = 2'-O-methyl cytidine
  modified_base 18: mod_base = OTHER; note = 2'-O-methyl uridine
  modified_base 22: mod_base = OTHER; note = 2'-O-methyl uridine
  modified_base 25: mod_base = OTHER; note = 2'-O-methyl guanosine
  modified_base 29: mod_base = OTHER; note = 2'-O-methyl uridine
  modified_base 30: mod_base = OTHER; note = 2'-O-methyl adenosine
  modified_base 31: mod_base = OTHER; note = 2'-O-methyl guanosine
  modified_base 32: mod_base = OTHER; note = 2'-O-methyl cytidine
  modified_base 33: mod_base = OTHER; note = Deoxyuridine phosphorothioate
  modified_base 34: mod_base = OTHER; note = Deoxycytidine phosphorothioate
  modified_base 35: mod_base = OTHER; note = 2'-O-methyl cytidine
  modified_base 37: mod_base = OTHER; note = Deoxyuridine phosphorothioate
  modified_base 38: mod_base = OTHER; note = 2'-O-methyl uridine
  modified_base 39: mod_base = OTHER; note = 2'-O-methyl uridine phosphorothioate
  modified_base 40: mod_base = OTHER; note = 2'-O-methyl cytidine phosphorothioate
  modified_base 41: mod_base = OTHER; note = 2'-O-methyl uridine phosphorothioate
  modified_base 42: mod_base = OTHER; note = 2'-O-methyl cytidine
  misc_feature 1..32: note = RNA
  misc_feature 33..34: note = DNA
  misc_feature 35..36: note = RNA
  misc_feature 37: note = DNA
  misc_feature 38..42: note = RNA

SEQ ID NO: 229 - DNA, 42 bp, synthetic construct; identical to SEQ ID NO: 174
  source 1..42: mol_type = other DNA
  modified_base 1: mod_base = OTHER; note = 2'-O-methyl cytidine phosphorothioate
  modified_base 2: mod_base = OTHER; note = 2'-O-methyl uridine phosphorothioate
  modified_base 3: mod_base = OTHER; note = 2'-O-methyl guanosine phosphorothioate
  modified_base 4: mod_base = OTHER; note = 2'-O-methyl adenosine
  modified_base 5: mod_base = OTHER; note = 2'-O-methyl adenosine
  modified_base 9: mod_base = OTHER; note = 2'-O-methyl guanosine
  modified_base 10: mod_base = OTHER; note = 2'-O-methyl uridine
  modified_base 11: mod_base = OTHER; note = 2'-O-methyl guanosine
  modified_base 13: mod_base = OTHER; note = 2'-O-methyl cytidine
  modified_base 18: mod_base = OTHER; note = 2'-O-methyl uridine
  modified_base 22: mod_base = OTHER; note = 2'-O-methyl uridine
  modified_base 25: mod_base = OTHER; note = 2'-O-methyl guanosine
  modified_base 29: mod_base = OTHER; note = 2'-O-methyl uridine
  modified_base 30: mod_base = OTHER; note = 2'-O-methyl adenosine
  modified_base 31: mod_base = OTHER; note = 2'-O-methyl guanosine
  modified_base 32: mod_base = OTHER; note = 2'-O-methyl cytidine
  modified_base 33: mod_base = OTHER; note = 2'-O-methyl uridine
  modified_base 34: mod_base = OTHER; note = 2'-O-methyl cytidine
  modified_base 35: mod_base = OTHER; note = Deoxycytidine phosphorothioate
  modified_base 37: mod_base = OTHER; note = Deoxyuridine phosphorothioate
  modified_base 38: mod_base = OTHER; note = 2'-O-methyl uridine
  modified_base 39: mod_base = OTHER; note = 2'-O-methyl uridine phosphorothioate
  modified_base 40: mod_base = OTHER; note = 2'-O-methyl cytidine phosphorothioate
  modified_base 41: mod_base = OTHER; note = 2'-O-methyl uridine phosphorothioate
  modified_base 42: mod_base = OTHER; note = 2'-O-methyl cytidine
  misc_feature 1..34: note = RNA
  misc_feature 35: note = DNA
  misc_feature 36: note = RNA
  misc_feature 37: note = DNA
  misc_feature 38..42: note = RNA

SEQ ID NO: 230 - DNA, 42 bp, synthetic construct; identical to SEQ ID NO: 174
  source 1..42: mol_type = other DNA
  modified_base 1: mod_base = OTHER; note = 2'-O-methyl cytidine phosphorothioate
  modified_base 2: mod_base = OTHER; note = 2'-O-methyl uridine phosphorothioate
  modified_base 3: mod_base = OTHER; note = 2'-O-methyl guanosine phosphorothioate
  modified_base 4: mod_base = OTHER; note = 2'-O-methyl adenosine
  modified_base 5: mod_base = OTHER; note = 2'-O-methyl adenosine
  modified_base 9: mod_base = OTHER; note = 2'-O-methyl guanosine
  modified_base 10: mod_base = OTHER; note = 2'-O-methyl uridine
  modified_base 11: mod_base = OTHER; note = 2'-O-methyl guanosine
  modified_base 13: mod_base = OTHER; note = 2'-O-methyl cytidine
  modified_base 18: mod_base = OTHER; note = 2'-O-methyl uridine
  modified_base 22: mod_base = OTHER; note = 2'-O-methyl uridine
  modified_base 25: mod_base = OTHER; note = 2'-O-methyl guanosine
  modified_base 29: mod_base = OTHER; note = 2'-O-methyl uridine
  modified_base 30: mod_base = OTHER; note = 2'-O-methyl adenosine
  modified_base 31: mod_base = OTHER; note = 2'-O-methyl guanosine
  modified_base 32: mod_base = OTHER; note = 2'-O-methyl cytidine
  modified_base 33: mod_base = OTHER; note = 2'-O-methyl uridine
  modified_base 34: mod_base = OTHER; note = Deoxycytidine phosphorothioate
  modified_base 35: mod_base = OTHER; note = 2'-O-methyl cytidine
  modified_base 37: mod_base = OTHER; note = Deoxyuridine phosphorothioate
  modified_base 38: mod_base = OTHER; note = 2'-O-methyl uridine
  modified_base 39: mod_base = OTHER; note = 2'-O-methyl uridine phosphorothioate
  modified_base 40: mod_base = OTHER; note = 2'-O-methyl cytidine phosphorothioate
  modified_base 41: mod_base = OTHER; note = 2'-O-methyl uridine phosphorothioate
  modified_base 42: mod_base = OTHER; note = 2'-O-methyl cytidine
  misc_feature 1..33: note = RNA
  misc_feature 34: note = DNA
  misc_feature 35..36: note = RNA
  misc_feature 37: note = DNA
  misc_feature 38..42: note = RNA

SEQ ID NO: 231 - DNA, 42 bp, synthetic construct; identical to SEQ ID NO: 174
  source 1..42: mol_type = other DNA
  modified_base 1: mod_base = OTHER; note = 2'-O-methyl cytidine phosphorothioate
  modified_base 2: mod_base = OTHER; note = 2'-O-methyl uridine phosphorothioate
  modified_base 3: mod_base = OTHER; note = 2'-O-methyl guanosine phosphorothioate
  modified_base 4: mod_base = OTHER; note = 2'-O-methyl adenosine
  modified_base 5: mod_base = OTHER; note = 2'-O-methyl adenosine
  modified_base 9: mod_base = OTHER; note = 2'-O-methyl guanosine
  modified_base 10: mod_base = OTHER; note = 2'-O-methyl uridine
  modified_base 11: mod_base = OTHER; note = 2'-O-methyl guanosine
  modified_base 13: mod_base = OTHER; note = 2'-O-methyl cytidine
  modified_base 18: mod_base = OTHER; note = 2'-O-methyl uridine
  modified_base 22: mod_base = OTHER; note = 2'-O-methyl uridine
  modified_base 25: mod_base = OTHER; note = 2'-O-methyl guanosine
  modified_base 29: mod_base = OTHER; note = 2'-O-methyl uridine
  modified_base 30: mod_base = OTHER; note = 2'-O-methyl adenosine
  modified_base 31: mod_base = OTHER; note = 2'-O-methyl guanosine
  modified_base 32: mod_base = OTHER; note = 2'-O-methyl cytidine
  modified_base 33: mod_base = OTHER; note = Deoxyuridine phosphorothioate
  modified_base 34: mod_base = OTHER; note = 2'-O-methyl cytidine
  modified_base 35: mod_base = OTHER; note = 2'-O-methyl cytidine
  modified_base 37: mod_base = OTHER; note = Deoxyuridine phosphorothioate
  modified_base 38: mod_base = OTHER; note = 2'-O-methyl uridine
  modified_base 39: mod_base = OTHER; note = 2'-O-methyl uridine phosphorothioate
  modified_base 40: mod_base = OTHER; note = 2'-O-methyl cytidine phosphorothioate
  modified_base 41: mod_base = OTHER; note = 2'-O-methyl uridine phosphorothioate
  modified_base 42: mod_base = OTHER; note = 2'-O-methyl cytidine
  misc_feature 1..32: note = RNA
  misc_feature 33: note = DNA
  misc_feature 34..36: note = RNA
  misc_feature 37: note = DNA
  misc_feature 38..42: note = RNA

SEQ ID NO: 232 - DNA, 42 bp, synthetic construct; identical to SEQ ID NO: 174
  source 1..42: mol_type = other DNA
  modified_base 1: mod_base = OTHER; note = 2'-O-methyl cytidine phosphorothioate
  modified_base 2: mod_base = OTHER; note = 2'-O-methyl uridine phosphorothioate
  modified_base 3: mod_base = OTHER; note = 2'-O-methyl guanosine phosphorothioate
  modified_base 4: mod_base = OTHER; note = 2'-O-methyl adenosine
  modified_base 5: mod_base = OTHER; note = 2'-O-methyl adenosine
  modified_base 9: mod_base = OTHER; note = 2'-O-methyl guanosine
  modified_base 10: mod_base = OTHER; note = 2'-O-methyl uridine
  modified_base 11: mod_base = OTHER; note = 2'-O-methyl guanosine
  modified_base 13: mod_base = OTHER; note = 2'-O-methyl cytidine
  modified_base 18: mod_base = OTHER; note = 2'-O-methyl uridine
  modified_base 22: mod_base = OTHER; note = 2'-O-methyl uridine
  modified_base 25: mod_base = OTHER; note = 2'-O-methyl guanosine
  modified_base 29: mod_base = OTHER; note = 2'-O-methyl uridine
  modified_base 30: mod_base = OTHER; note = 2'-O-methyl adenosine
  modified_base 31: mod_base = OTHER; note = 2'-O-methyl guanosine
  modified_base 32: mod_base = OTHER; note = 2'-O-methyl cytidine
  modified_base 33: mod_base = OTHER; note = 2'-O-methyl uridine
  modified_base 34: mod_base = OTHER; note = 2'-O-methyl cytidine
  modified_base 35: mod_base = OTHER; note = 2'-O-methyl cytidine
  modified_base 37: mod_base = OTHER; note = Deoxyuridine phosphorothioate
  modified_base 38: mod_base = OTHER; note = 2'-O-methyl uridine
  modified_base 39: mod_base = OTHER; note = 2'-O-methyl uridine phosphorothioate
  modified_base 40: mod_base = OTHER; note = 2'-O-methyl cytidine phosphorothioate
  modified_base 41: mod_base = OTHER; note = 2'-O-methyl uridine phosphorothioate
  modified_base 42: mod_base = OTHER; note = 2'-O-methyl cytidine
  misc_feature 1..36: note = RNA
  misc_feature 37: note = DNA
  misc_feature 38..42: note = RNA

SEQ ID NO: 233 - DNA, 42 bp, synthetic construct; identical to SEQ ID NO: 174
  source 1..42: mol_type = other DNA
  modified_base 1: mod_base = OTHER; note = 2'-O-methyl cytidine phosphorothioate
  modified_base 2: mod_base = OTHER; note = 2'-O-methyl uridine phosphorothioate
  modified_base 3: mod_base = OTHER; note = 2'-O-methyl guanosine phosphorothioate
  modified_base 4: mod_base = OTHER; note = 2'-O-methyl adenosine
  modified_base 5: mod_base = OTHER; note = 2'-O-methyl adenosine
  modified_base 9: mod_base = OTHER; note = 2'-O-methyl guanosine
  modified_base 10: mod_base = OTHER; note = 2'-O-methyl uridine
  modified_base 11: mod_base = OTHER; note = 2'-O-methyl guanosine
  modified_base 13: mod_base = OTHER; note = 2'-O-methyl cytidine
  modified_base 18: mod_base = OTHER; note = 2'-O-methyl uridine
  modified_base 22: mod_base = OTHER; note = 2'-O-methyl uridine
  modified_base 25: mod_base = OTHER; note = 2'-O-methyl guanosine
  modified_base 26: mod_base = OTHER; note = Deoxyuridine phosphorothioate
  modified_base 27: mod_base = OTHER; note = Deoxyuridine phosphorothioate
  modified_base 28: mod_base = OTHER; note = 2'-O-methyl guanosine
  modified_base 29: mod_base = OTHER; note = 2'-O-methyl uridine
  modified_base 30: mod_base = OTHER; note = 2'-O-methyl adenosine
  modified_base 31: mod_base = OTHER; note = 2'-O-methyl guanosine
  modified_base 32: mod_base = OTHER; note = 2'-O-methyl cytidine
  modified_base 33: mod_base = OTHER; note = Deoxyuridine phosphorothioate
  modified_base 34: mod_base = OTHER; note = Deoxycytidine phosphorothioate
  modified_base 35: mod_base = OTHER; note = Deoxycytidine phosphorothioate
  modified_base 37: mod_base = OTHER; note = Deoxyuridine phosphorothioate
  modified_base 38: mod_base = OTHER; note = 2'-O-methyl uridine
  modified_base 39: mod_base = OTHER; note = 2'-O-methyl uridine phosphorothioate
  modified_base 40: mod_base = OTHER; note = 2'-O-methyl cytidine phosphorothioate
  modified_base 41: mod_base = OTHER; note = 2'-O-methyl uridine phosphorothioate
  modified_base 42: mod_base = OTHER; note = 2'-O-methyl cytidine
  misc_feature 1..25: note = RNA
  misc_feature 26..27: note = DNA
  misc_feature 28..32: note = RNA
  misc_feature 33..35: note = DNA
  misc_feature 36: note = RNA
  misc_feature 37: note = DNA
  misc_feature 38..42: note = RNA

SEQ ID NO: 234 - DNA, 42 bp, synthetic construct; identical to SEQ ID NO: 174
  source 1..42: mol_type = other DNA
  modified_base 1: mod_base = OTHER; note = 2'-O-methyl cytidine phosphorothioate
  modified_base 2: mod_base = OTHER; note = 2'-O-methyl uridine phosphorothioate
  modified_base 3: mod_base = OTHER; note = 2'-O-methyl guanosine phosphorothioate
  modified_base 4: mod_base = OTHER; note = 2'-O-methyl adenosine
  modified_base 5: mod_base = OTHER; note = 2'-O-methyl adenosine
  modified_base 9: mod_base = OTHER; note = 2'-O-methyl guanosine
  modified_base 10: mod_base = OTHER; note = 2'-O-methyl uridine
  modified_base 11: mod_base = OTHER; note = 2'-O-methyl guanosine
  modified_base 13: mod_base = OTHER; note = 2'-O-methyl cytidine
  modified_base 18: mod_base = OTHER; note = 2'-O-methyl uridine
  modified_base 22: mod_base = OTHER; note = 2'-O-methyl uridine
  modified_base 25: mod_base = OTHER; note = 2'-O-methyl guanosine
  modified_base 26: mod_base = OTHER; note = Deoxyuridine phosphorothioate
  modified_base 27: mod_base = OTHER; note = Deoxyuridine phosphorothioate
  modified_base 28: mod_base = OTHER; note = 2'-O-methyl guanosine
  modified_base 29: mod_base = OTHER; note = 2'-O-methyl uridine
  modified_base 30: mod_base = OTHER; note = 2'-O-methyl adenosine
  modified_base 31: mod_base = OTHER; note = 2'-O-methyl guanosine
  modified_base 32: mod_base = OTHER; note = 2'-O-methyl cytidine
  modified_base 33: mod_base = OTHER; note = Deoxyuridine phosphorothioate
  modified_base 34: mod_base = OTHER; note = Deoxycytidine phosphorothioate
  modified_base 35: mod_base = OTHER; note = Deoxycytidine phosphorothioate
  modified_base 36: mod_base = OTHER; note = 2'-O-methyl cytidine
  modified_base 37: mod_base = OTHER; note = Deoxyuridine phosphorothioate
  modified_base 38: mod_base = OTHER; note = 2'-O-methyl uridine
  modified_base 39: mod_base = OTHER; note = 2'-O-methyl uridine phosphorothioate
  modified_base 40: mod_base = OTHER; note = 2'-O-methyl cytidine phosphorothioate
  modified_base 41: mod_base = OTHER; note = 2'-O-methyl uridine phosphorothioate
  modified_base 42: mod_base = OTHER; note = 2'-O-methyl cytidine
  misc_feature 1..25: note = RNA
  misc_feature 26..27: note = DNA
  misc_feature 28..32: note = RNA
  misc_feature 33..35: note = DNA
  misc_feature 36: note = RNA
  misc_feature 37: note = DNA
  misc_feature 38..42: note = RNA

SEQ ID NO: 235 - DNA, 42 bp, synthetic construct; identical to SEQ ID NO: 174
  source 1..42: mol_type = other DNA
  modified_base 1: mod_base = OTHER; note = 2'-O-methyl cytidine phosphorothioate
  modified_base 2: mod_base = OTHER; note = 2'-O-methyl uridine phosphorothioate
  modified_base 3: mod_base = OTHER; note = 2'-O-methyl guanosine phosphorothioate
  modified_base 4: mod_base = OTHER; note = 2'-O-methyl adenosine
  modified_base 5: mod_base = OTHER; note = 2'-O-methyl adenosine
  modified_base 9: mod_base = OTHER; note = 2'-O-methyl guanosine
  modified_base 10: mod_base = OTHER; note = 2'-O-methyl uridine
  modified_base 11: mod_base = OTHER; note = 2'-O-methyl guanosine
  modified_base 13: mod_base = OTHER; note = 2'-O-methyl cytidine
  modified_base 18: mod_base = OTHER; note = 2'-O-methyl uridine
  modified_base 22: mod_base = OTHER; note = 2'-O-methyl uridine
  modified_base 25: mod_base = OTHER; note = 2'-O-methyl guanosine
  modified_base 26: mod_base = OTHER; note = Deoxyuridine phosphorothioate
  modified_base 27: mod_base = OTHER; note = Deoxyuridine phosphorothioate
  modified_base 28: mod_base = OTHER; note = 2'-O-methyl guanosine
  modified_base 29: mod_base = OTHER; note = 2'-O-methyl uridine
  modified_base 30: mod_base = OTHER; note = 2'-O-methyl adenosine
  modified_base 31: mod_base = OTHER; note = 2'-O-methyl guanosine
  modified_base 32: mod_base = OTHER; note = 2'-O-methyl cytidine
  modified_base 33: mod_base = OTHER; note = 2'-O-methyl uridine
  modified_base 34: mod_base = OTHER; note = Deoxycytidine phosphorothioate
  modified_base 35: mod_base = OTHER; note = Deoxycytidine phosphorothioate
  modified_base 37: mod_base = OTHER; note = Deoxyuridine phosphorothioate
  modified_base 38: mod_base = OTHER; note = 2'-O-methyl uridine
  modified_base 39: mod_base = OTHER; note = 2'-O-methyl uridine phosphorothioate
  modified_base 40: mod_base = OTHER; note = 2'-O-methyl cytidine phosphorothioate
  modified_base 41: mod_base = OTHER; note = 2'-O-methyl uridine phosphorothioate
  modified_base 42: mod_base = OTHER; note = 2'-O-methyl cytidine
  misc_feature 1..25: note = RNA
  misc_feature 26..27: note = DNA
  misc_feature 28..33: note = RNA
  misc_feature 34..35: note = DNA
  misc_feature 36: note = RNA
  misc_feature 37: note = DNA
  misc_feature 38..42: note = RNA

SEQ ID NO: 236 - DNA, 42 bp, synthetic construct; identical to SEQ ID NO: 174
  source 1..42: mol_type = other DNA
  modified_base 1: mod_base = OTHER; note = 2'-O-methyl cytidine phosphorothioate
  modified_base 2: mod_base = OTHER; note = 2'-O-methyl uridine phosphorothioate
  modified_base 3: mod_base = OTHER; note = 2'-O-methyl guanosine phosphorothioate
  modified_base 4: mod_base = OTHER; note = 2'-O-methyl adenosine
  modified_base 5: mod_base = OTHER; note = 2'-O-methyl adenosine
  modified_base 9: mod_base = OTHER; note = 2'-O-methyl guanosine
  modified_base 10: mod_base = OTHER; note = 2'-O-methyl uridine
  modified_base 11: mod_base = OTHER; note = 2'-O-methyl guanosine
  modified_base 13: mod_base = OTHER; note = 2'-O-methyl cytidine
  modified_base 18: mod_base = OTHER; note = 2'-O-methyl uridine
  modified_base 22: mod_base = OTHER; note = 2'-O-methyl uridine
  modified_base 25: mod_base = OTHER; note = 2'-O-methyl guanosine
  modified_base 26: mod_base = OTHER; note = Deoxyuridine phosphorothioate
  modified_base 27: mod_base = OTHER; note = Deoxyuridine phosphorothioate
  modified_base 28: mod_base = OTHER; note = 2'-O-methyl guanosine
  modified_base 29: mod_base = OTHER; note = 2'-O-methyl uridine
  modified_base 30: mod_base = OTHER; note = 2'-O-methyl adenosine
  modified_base 31: mod_base = OTHER; note = 2'-O-methyl guanosine
  modified_base 32: mod_base = OTHER; note = 2'-O-methyl cytidine
  modified_base 33: mod_base = OTHER; note = Deoxyuridine phosphorothioate
  modified_base 34: mod_base = OTHER; note = 2'-O-methyl cytidine
  modified_base 35: mod_base = OTHER; note = Deoxycytidine phosphorothioate
  modified_base 37: mod_base = OTHER; note = Deoxyuridine phosphorothioate
  modified_base 38: mod_base = OTHER; note = 2'-O-methyl uridine
  modified_base 39: mod_base = OTHER; note = 2'-O-methyl uridine phosphorothioate
  modified_base 40: mod_base = OTHER; note = 2'-O-methyl cytidine phosphorothioate
  modified_base 41: mod_base = OTHER; note = 2'-O-methyl uridine phosphorothioate
  modified_base 42: mod_base = OTHER; note = 2'-O-methyl cytidine
  misc_feature 1..25: note = RNA
  misc_feature 26..27: note = DNA
  misc_feature 28..32: note = RNA
  misc_feature 33: note = DNA
  misc_feature 34: note = RNA
  misc_feature 35: note = DNA
  misc_feature 36: note = RNA
  misc_feature 37: note = DNA
  misc_feature 38..42: note = RNA

SEQ ID NO: 237 - DNA, 42 bp, synthetic construct; identical to SEQ ID NO: 174
  source 1..42: mol_type = other DNA
  modified_base 1: mod_base = OTHER; note = 2'-O-methyl cytidine phosphorothioate
  modified_base 2: mod_base = OTHER; note = 2'-O-methyl uridine phosphorothioate
  modified_base 3: mod_base = OTHER; note = 2'-O-methyl guanosine phosphorothioate
  modified_base 4: mod_base = OTHER; note = 2'-O-methyl adenosine
  modified_base 5: mod_base = OTHER; note = 2'-O-methyl adenosine
  modified_base 9: mod_base = OTHER; note = 2'-O-methyl guanosine
  modified_base 10: mod_base = OTHER; note = 2'-O-methyl uridine
  modified_base 11: mod_base = OTHER; note = 2'-O-methyl guanosine
  modified_base 13: mod_base = OTHER; note = 2'-O-methyl cytidine
  modified_base 18: mod_base = OTHER; note = 2'-O-methyl uridine
  modified_base 22: mod_base = OTHER; note = 2'-O-methyl uridine
  modified_base 25: mod_base = OTHER; note = 2'-O-methyl guanosine
  modified_base 26: mod_base = OTHER; note = Deoxyuridine phosphorothioate
  modified_base 27: mod_base = OTHER; note = Deoxyuridine phosphorothioate
  modified_base 28: mod_base = OTHER; note = 2'-O-methyl guanosine
  modified_base 29: mod_base = OTHER; note = 2'-O-methyl uridine
  modified_base 30: mod_base = OTHER; note = 2'-O-methyl adenosine
  modified_base 31: mod_base = OTHER; note = 2'-O-methyl guanosine
  modified_base 32: mod_base = OTHER; note = 2'-O-methyl cytidine
  modified_base 33: mod_base = OTHER; note = Deoxyuridine phosphorothioate
  modified_base 34: mod_base = OTHER; note = Deoxycytidine phosphorothioate
  modified_base 35: mod_base = OTHER; note = 2'-O-methyl cytidine
  modified_base 37: mod_base = OTHER; note = Deoxyuridine phosphorothioate
  modified_base 38: mod_base = OTHER; note = 2'-O-methyl uridine
  modified_base 39: mod_base = OTHER; note = 2'-O-methyl uridine phosphorothioate
  modified_base 40: mod_base = OTHER; note = 2'-O-methyl cytidine phosphorothioate
  modified_base 41: mod_base = OTHER; note = 2'-O-methyl uridine phosphorothioate
  modified_base 42: mod_base = OTHER; note = 2'-O-methyl cytidine
  misc_feature 1..25: note = RNA
  misc_feature 26..27: note = DNA
  misc_feature 28..32: note = RNA
  misc_feature 33..34: note = DNA
  misc_feature 35..36: note = RNA
  misc_feature 37: note = DNA
  misc_feature 38..42: note = RNA

SEQ ID NO: 238 - DNA, 42 bp, synthetic construct; identical to SEQ ID NO: 174
  source 1..42: mol_type = other DNA
  modified_base 1: mod_base = OTHER; note = 2'-O-methyl cytidine phosphorothioate
  modified_base 2: mod_base = OTHER; note = 2'-O-methyl uridine phosphorothioate
  modified_base 3: mod_base = OTHER; note = 2'-O-methyl guanosine phosphorothioate
  modified_base 4: mod_base = OTHER; note = 2'-O-methyl adenosine
  modified_base 5: mod_base = OTHER; note = 2'-O-methyl adenosine
  modified_base 9: mod_base = OTHER; note = 2'-O-methyl guanosine
  modified_base 10: mod_base = OTHER; note = 2'-O-methyl uridine
  modified_base 11: mod_base = OTHER; note = 2'-O-methyl guanosine
  modified_base 13: mod_base = OTHER; note = 2'-O-methyl cytidine
  modified_base 18: mod_base = OTHER; note = 2'-O-methyl uridine
  modified_base 22: mod_base = OTHER; note = 2'-O-methyl uridine
  modified_base 25: mod_base = OTHER; note = 2'-O-methyl guanosine
  modified_base 26: mod_base = OTHER; note = Deoxyuridine phosphorothioate
  modified_base 27: mod_base = OTHER; note = Deoxyuridine phosphorothioate
  modified_base 28: mod_base = OTHER; note = 2'-O-methyl guanosine
  modified_base 29: mod_base = OTHER; note = 2'-O-methyl uridine
  modified_base 30: mod_base = OTHER; note = 2'-O-methyl adenosine
  modified_base 31: mod_base = OTHER; note = 2'-O-methyl guanosine
  modified_base 32: mod_base = OTHER; note = 2'-O-methyl cytidine
  modified_base 33: mod_base = OTHER; note = 2'-O-methyl uridine
  modified_base 34: mod_base = OTHER; note = 2'-O-methyl cytidine
  modified_base 35: mod_base = OTHER; note = Deoxycytidine phosphorothioate
  modified_base 37: mod_base = OTHER; note = Deoxyuridine phosphorothioate
  modified_base 38: mod_base = OTHER; note = 2'-O-methyl uridine
  modified_base 39: mod_base = OTHER; note = 2'-O-methyl uridine phosphorothioate
  modified_base 40: mod_base = OTHER; note = 2'-O-methyl cytidine phosphorothioate
  modified_base 41: mod_base = OTHER; note = 2'-O-methyl uridine phosphorothioate
  modified_base 42: mod_base = OTHER; note = 2'-O-methyl cytidine
  misc_feature 1..25: note = RNA
  misc_feature 26..27: note = DNA
  misc_feature 28..34: note = RNA
  misc_feature 35: note = DNA
  misc_feature 36: note = RNA
  misc_feature 37: note = DNA
  misc_feature 38..42: note = RNA

SEQ ID NO: 239 - DNA, 42 bp, synthetic construct; identical to SEQ ID NO: 174
  source 1..42: mol_type = other DNA
  modified_base 1: mod_base = OTHER; note = 2'-O-methyl cytidine phosphorothioate
  modified_base 2: mod_base = OTHER; note = 2'-O-methyl uridine phosphorothioate
  modified_base 3: mod_base = OTHER; note = 2'-O-methyl guanosine phosphorothioate
  modified_base 4: mod_base = OTHER; note = 2'-O-methyl adenosine
  modified_base 5: mod_base = OTHER; note = 2'-O-methyl adenosine
  modified_base 9: mod_base = OTHER; note = 2'-O-methyl guanosine
  modified_base 10: mod_base = OTHER; note = 2'-O-methyl uridine
  modified_base 11: mod_base = OTHER; note = 2'-O-methyl guanosine
  modified_base 13: mod_base = OTHER; note = 2'-O-methyl cytidine
  modified_base 18: mod_base = OTHER; note = 2'-O-methyl uridine
  modified_base 22: mod_base = OTHER; note = 2'-O-methyl uridine
  modified_base 25: mod_base = OTHER; note = 2'-O-methyl guanosine
  modified_base 26: mod_base = OTHER; note = Deoxyuridine phosphorothioate
  modified_base 27: mod_base = OTHER; note = Deoxyuridine phosphorothioate
  modified_base 28: mod_base = OTHER; note = 2'-O-methyl guanosine
  modified_base 29: mod_base = OTHER; note = 2'-O-methyl uridine
  modified_base 30: mod_base = OTHER; note = 2'-O-methyl adenosine
  modified_base 31: mod_base = OTHER; note = 2'-O-methyl guanosine
  modified_base 32: mod_base = OTHER; note = 2'-O-methyl cytidine
  modified_base 33: mod_base = OTHER; note = 2'-O-methyl uridine
  modified_base 34: mod_base = OTHER; note = Deoxycytidine phosphorothioate
  modified_base 35: mod_base = OTHER; note = 2'-O-methyl cytidine
  modified_base 37: mod_base = OTHER; note = Deoxyuridine phosphorothioate
  modified_base 38: mod_base = OTHER; note = 2'-O-methyl uridine
  modified_base 39: mod_base = OTHER; note = 2'-O-methyl uridine phosphorothioate
  modified_base 40: mod_base = OTHER; note = 2'-O-methyl cytidine phosphorothioate
  modified_base 41: mod_base = OTHER; note = 2'-O-methyl uridine phosphorothioate
  modified_base 42: mod_base = OTHER; note = 2'-O-methyl cytidine
  misc_feature 1..25: note = RNA
  misc_feature 26..27: note = DNA
  misc_feature 28..33: note = RNA
  misc_feature 34: note = DNA
  misc_feature 35..36: note = RNA
  misc_feature 37: note = DNA
  misc_feature 38..42: note = RNA

SEQ ID NO: 240 - DNA, 42 bp, synthetic construct; identical to SEQ ID NO: 174
  source 1..42: mol_type = other DNA
  modified_base 1: mod_base = OTHER; note = 2'-O-methyl cytidine phosphorothioate
  modified_base 2: mod_base = OTHER; note = 2'-O-methyl uridine phosphorothioate
  modified_base 3: mod_base = OTHER; note = 2'-O-methyl guanosine phosphorothioate
  modified_base 4: mod_base = OTHER; note = 2'-O-methyl adenosine
  modified_base 5: mod_base = OTHER; note = 2'-O-methyl adenosine
  modified_base 9: mod_base = OTHER; note = 2'-O-methyl guanosine
  modified_base 10: mod_base = OTHER; note = 2'-O-methyl uridine
  modified_base 11: mod_base = OTHER; note = 2'-O-methyl guanosine
  modified_base 13: mod_base = OTHER; note = 2'-O-methyl cytidine
  modified_base 18: mod_base = OTHER; note = 2'-O-methyl uridine
  modified_base 22: mod_base = OTHER; note = 2'-O-methyl uridine
  modified_base 25: mod_base = OTHER; note = 2'-O-methyl guanosine
  modified_base 26: mod_base = OTHER; note = Deoxyuridine phosphorothioate
  modified_base 27: mod_base = OTHER; note = Deoxyuridine phosphorothioate
  modified_base 28: mod_base = OTHER; note = 2'-O-methyl guanosine
  modified_base 29: mod_base = OTHER; note = 2'-O-methyl uridine
  modified_base 30: mod_base = OTHER; note = 2'-O-methyl adenosine
  modified_base 31: mod_base = OTHER; note = 2'-O-methyl guanosine
  modified_base 32: mod_base = OTHER; note = 2'-O-methyl cytidine
  modified_base 33: mod_base = OTHER; note = Deoxyuridine phosphorothioate
  modified_base 34: mod_base = OTHER; note = 2'-O-methyl cytidine
  modified_base 35: mod_base = OTHER; note = 2'-O-methyl cytidine
  modified_base 37: mod_base = OTHER; note = Deoxyuridine phosphorothioate
  modified_base 38: mod_base = OTHER; note = 2'-O-methyl uridine
  modified_base 39: mod_base = OTHER; note = 2'-O-methyl uridine phosphorothioate
  modified_base 40: mod_base = OTHER; note = 2'-O-methyl cytidine phosphorothioate
  modified_base 41: mod_base = OTHER; note = 2'-O-methyl uridine phosphorothioate
  modified_base 42: mod_base = OTHER; note = 2'-O-methyl cytidine
  misc_feature 1..25: note = RNA
  misc_feature 26..27: note = DNA
  misc_feature 28..32: note = RNA
  misc_feature 33: note = DNA
  misc_feature 34..36: note = RNA
  misc_feature 37: note = DNA
  misc_feature 38..42: note = RNA

SEQ ID NO: 241 - DNA, 42 bp, synthetic construct; identical to SEQ ID NO: 174
  source 1..42: mol_type = other DNA
  modified_base 1: mod_base = OTHER; note = 2'-O-methyl cytidine phosphorothioate
  modified_base 2: mod_base = OTHER; note = 2'-O-methyl uridine phosphorothioate
  modified_base 3: mod_base = OTHER; note = 2'-O-methyl guanosine phosphorothioate
  modified_base 4: mod_base = OTHER; note = 2'-O-methyl adenosine
  modified_base 5: mod_base = OTHER; note = 2'-O-methyl adenosine
  modified_base 9: mod_base = OTHER; note = 2'-O-methyl guanosine
  modified_base 10: mod_base = OTHER; note = 2'-O-methyl uridine
  modified_base 11: mod_base = OTHER; note = 2'-O-methyl guanosine
  modified_base 13: mod_base = OTHER; note = 2'-O-methyl cytidine
  modified_base 18: mod_base = OTHER; note = 2'-O-methyl uridine
  modified_base 22: mod_base = OTHER; note = 2'-O-methyl uridine
  modified_base 25: mod_base = OTHER; note = 2'-O-methyl guanosine
  modified_base 26: mod_base = OTHER; note = Deoxyuridine phosphorothioate
  modified_base 27: mod_base = OTHER; note = Deoxyuridine phosphorothioate
  modified_base 28: mod_base = OTHER; note = 2'-O-methyl guanosine
  modified_base 29: mod_base = OTHER; note = 2'-O-methyl uridine
  modified_base 30: mod_base = OTHER; note = 2'-O-methyl adenosine
  modified_base 31: mod_base = OTHER; note = 2'-O-methyl guanosine
  modified_base 32: mod_base = OTHER; note = 2'-O-methyl cytidine
  modified_base 33: mod_base = OTHER; note = 2'-O-methyl uridine
  modified_base 34: mod_base = OTHER; note = 2'-O-methyl cytidine
  modified_base 35: mod_base = OTHER; note = 2'-O-methyl cytidine
  modified_base 37: mod_base = OTHER; note = Deoxyuridine phosphorothioate
  modified_base 38: mod_base = OTHER; note = 2'-O-methyl uridine
  modified_base 39: mod_base = OTHER; note = 2'-O-methyl uridine phosphorothioate
  modified_base 40: mod_base = OTHER; note = 2'-O-methyl cytidine phosphorothioate
  modified_base 41: mod_base = OTHER; note = 2'-O-methyl uridine phosphorothioate
  modified_base 42: mod_base = OTHER; note = 2'-O-methyl cytidine
  misc_feature 1..25: note = RNA
  misc_feature 26..27: note = DNA
  misc_feature 28..36: note = RNA
  misc_feature 37: note = DNA
  misc_feature 38..42: note = RNA

SEQ ID NO: 242 - DNA, 42 bp, synthetic construct; identical to SEQ ID NO: 174
  source 1..42: mol_type = other DNA
  modified_base 1: mod_base = OTHER; note = 2'-O-methyl cytidine phosphorothioate
  modified_base 2: mod_base = OTHER; note = 2'-O-methyl uridine phosphorothioate
  modified_base 3: mod_base = OTHER; note = 2'-O-methyl guanosine phosphorothioate
  modified_base 4: mod_base = OTHER; note = 2'-O-methyl adenosine
  modified_base 5: mod_base = OTHER; note = 2'-O-methyl adenosine
  modified_base 9: mod_base = OTHER; note = 2'-O-methyl guanosine
  modified_base 10: mod_base = OTHER; note = 2'-O-methyl uridine
  modified_base 11: mod_base = OTHER; note = 2'-O-methyl guanosine
  modified_base 13: mod_base = OTHER; note = 2'-O-methyl cytidine
  modified_base 18: mod_base = OTHER; note = 2'-O-methyl uridine
  modified_base 22: mod_base = OTHER; note = 2'-O-methyl uridine
  modified_base 25: mod_base = OTHER; note = 2'-O-methyl guanosine
  modified_base 26: mod_base = OTHER; note = Deoxyuridine phosphorothioate
  modified_base 27: mod_base = OTHER; note = Deoxyuridine phosphorothioate
  modified_base 28: mod_base = OTHER; note = Deoxyguanosine phosphorothioate
  modified_base 29: mod_base = OTHER; note = 2'-O-methyl uridine
  modified_base 30: mod_base = OTHER; note = 2'-O-methyl adenosine
  modified_base 31: mod_base = OTHER; note = 2'-O-methyl guanosine
  modified_base 32: mod_base = OTHER; note = 2'-O-methyl cytidine
  modified_base 33: mod_base = OTHER; note = Deoxyuridine phosphorothioate
  modified_base 34: mod_base = OTHER; note = Deoxycytidine phosphorothioate
  modified_base 35: mod_base = OTHER; note = Deoxycytidine phosphorothioate
  modified_base 37: mod_base = OTHER; note = Deoxyuridine phosphorothioate
  modified_base 38: mod_base = OTHER; note = 2'-O-methyl uridine
  modified_base 39: mod_base = OTHER; note = 2'-O-methyl uridine phosphorothioate
  modified_base 40: mod_base = OTHER; note = 2'-O-methyl cytidine phosphorothioate
  modified_base 41: mod_base = OTHER; note = 2'-O-methyl uridine phosphorothioate
  modified_base 42: mod_base = OTHER; note = 2'-O-methyl cytidine
  misc_feature 1..25: note = RNA
  misc_feature 26..28: note = DNA
  misc_feature 29..32: note = RNA
  misc_feature 33..35: note = DNA
  misc_feature 36: note = RNA
  misc_feature 37: note = DNA
  misc_feature 38..42: note = RNA

SEQ ID NO: 243 - DNA, 42 bp, synthetic construct; identical to SEQ ID NO: 174
  source 1..42: mol_type = other DNA
  modified_base 1: mod_base = OTHER; note = 2'-O-methyl cytidine phosphorothioate
  modified_base 2: mod_base = OTHER; note = 2'-O-methyl uridine phosphorothioate
  modified_base 3: mod_base = OTHER; note = 2'-O-methyl guanosine phosphorothioate
  modified_base 4: mod_base = OTHER; note = 2'-O-methyl adenosine
  modified_base 5: mod_base = OTHER; note = 2'-O-methyl adenosine
  modified_base 9: mod_base = OTHER; note = 2'-O-methyl guanosine
  modified_base 10: mod_base = OTHER; note = 2'-O-methyl uridine
  modified_base 11: mod_base = OTHER; note = 2'-O-methyl guanosine
  modified_base 13: mod_base = OTHER; note = 2'-O-methyl cytidine
  modified_base 18: mod_base = OTHER; note = 2'-O-methyl uridine
  modified_base 22: mod_base = OTHER; note = 2'-O-methyl uridine
  modified_base 25: mod_base = OTHER; note = 2'-O-methyl guanosine
  modified_base 26: mod_base = OTHER; note = Deoxyuridine phosphorothioate
  modified_base 27: mod_base = OTHER; note = Deoxyuridine phosphorothioate
  modified_base 28: mod_base = OTHER; note = Deoxyguanosine phosphorothioate
  modified_base 29: mod_base = OTHER; note = 2'-O-methyl uridine
  modified_base 30: mod_base = OTHER; note = 2'-O-methyl adenosine
  modified_base 31: mod_base = OTHER; note = 2'-O-methyl guanosine
  modified_base 32: mod_base = OTHER; note = 2'-O-methyl cytidine
  modified_base 33: mod_base = OTHER; note = Deoxyuridine phosphorothioate
  modified_base 34: mod_base = OTHER; note = Deoxycytidine phosphorothioate
  modified_base 35: mod_base = OTHER; note = Deoxycytidine phosphorothioate
  modified_base 36: mod_base = OTHER; note = 2'-O-methyl cytidine
  modified_base 37: mod_base = OTHER; note = Deoxyuridine phosphorothioate
  modified_base 38: mod_base = OTHER; note = 2'-O-methyl uridine
  modified_base 39: mod_base = OTHER; note = 2'-O-methyl uridine phosphorothioate
  modified_base 40: mod_base = OTHER; note = 2'-O-methyl cytidine phosphorothioate
  modified_base 41: mod_base = OTHER; note = 2'-O-methyl uridine phosphorothioate
  modified_base 42: mod_base = OTHER; note = 2'-O-methyl cytidine
  misc_feature 1..25: note = RNA
  misc_feature 26..28: note = DNA
  misc_feature 29..32: note = RNA
  misc_feature 33..35: note = DNA
  misc_feature 36: note = RNA
  misc_feature 37: note = DNA
  misc_feature 38..42: note = RNA

SEQ ID NO: 244 - DNA, 42 bp, synthetic construct; identical to SEQ ID NO: 174
  source 1..42: mol_type = other DNA
  modified_base 1: mod_base = OTHER; note = 2'-O-methyl cytidine phosphorothioate
  modified_base 2: mod_base = OTHER; note = 2'-O-methyl uridine phosphorothioate
  modified_base 3: mod_base = OTHER; note = 2'-O-methyl guanosine phosphorothioate
  modified_base 4: mod_base = OTHER; note = 2'-O-methyl adenosine
  modified_base 5: mod_base = OTHER; note = 2'-O-methyl adenosine
  modified_base 9: mod_base = OTHER; note = 2'-O-methyl guanosine
  modified_base 10: mod_base = OTHER; note = 2'-O-methyl uridine
  modified_base 11: mod_base = OTHER; note = 2'-O-methyl guanosine
  modified_base 13: mod_base = OTHER; note = 2'-O-methyl cytidine
  modified_base 18: mod_base = OTHER; note = 2'-O-methyl uridine
  modified_base 22: mod_base = OTHER; note = 2'-O-methyl uridine
  modified_base 25: mod_base = OTHER; note = 2'-O-methyl guanosine
  modified_base 26: mod_base = OTHER; note = Deoxyuridine phosphorothioate
  modified_base 27: mod_base = OTHER; note = Deoxyuridine phosphorothioate
  modified_base 28: mod_base = OTHER; note = Deoxyguanosine phosphorothioate
  modified_base 29: mod_base = OTHER; note = 2'-O-methyl uridine
  modified_base 30: mod_base = OTHER; note = 2'-O-methyl adenosine
  modified_base 31: mod_base = OTHER; note = 2'-O-methyl guanosine
  modified_base 32: mod_base = OTHER; note = 2'-O-methyl cytidine
  modified_base 33: mod_base = OTHER; note = 2'-O-methyl uridine
  modified_base 34: mod_base = OTHER; note = Deoxycytidine phosphorothioate
  modified_base 35: mod_base = OTHER; note = Deoxycytidine phosphorothioate
  modified_base 37: mod_base = OTHER; note = Deoxyuridine phosphorothioate
  modified_base 38: mod_base = OTHER; note = 2'-O-methyl uridine
  modified_base 39: mod_base = OTHER; note = 2'-O-methyl uridine phosphorothioate
  modified_base 40: mod_base = OTHER; note = 2'-O-methyl cytidine phosphorothioate
  modified_base 41: mod_base = OTHER; note = 2'-O-methyl uridine phosphorothioate
  modified_base 42: mod_base = OTHER; note = 2'-O-methyl cytidine
  misc_feature 1..25: note = RNA
  misc_feature 26..28: note = DNA
  misc_feature 29..33: note = RNA
  misc_feature 34..35: note = DNA
  misc_feature 36: note = RNA
  misc_feature 37: note = DNA
  misc_feature 38..42: note = RNA

SEQ ID NO: 245 - DNA, 42 bp, synthetic construct; identical to SEQ ID NO: 174
  source 1..42: mol_type = other DNA
  modified_base 1: mod_base = OTHER; note = 2'-O-methyl cytidine phosphorothioate
  modified_base 2: mod_base = OTHER; note = 2'-O-methyl uridine phosphorothioate
  modified_base 3: mod_base = OTHER; note = 2'-O-methyl guanosine phosphorothioate
  modified_base 4: mod_base = OTHER; note = 2'-O-methyl adenosine
  modified_base 5: mod_base = OTHER; note = 2'-O-methyl adenosine
  modified_base 9: mod_base = OTHER; note = 2'-O-methyl guanosine
  modified_base 10: mod_base = OTHER; note = 2'-O-methyl uridine
  modified_base 11: mod_base = OTHER; note = 2'-O-methyl guanosine
  modified_base 13: mod_base = OTHER; note = 2'-O-methyl cytidine
  modified_base 18: mod_base = OTHER; note = 2'-O-methyl uridine
  modified_base 22: mod_base = OTHER; note = 2'-O-methyl uridine
  modified_base 25: mod_base = OTHER; note = 2'-O-methyl guanosine
  modified_base 26: mod_base = OTHER; note = Deoxyuridine phosphorothioate
  modified_base 27: mod_base = OTHER; note = Deoxyuridine phosphorothioate
  modified_base 28: mod_base = OTHER; note = Deoxyguanosine phosphorothioate
  modified_base 29: mod_base = OTHER; note = 2'-O-methyl uridine
  modified_base 30: mod_base = OTHER; note = 2'-O-methyl adenosine
  modified_base 31: mod_base = OTHER; note = 2'-O-methyl guanosine
  modified_base 32: mod_base = OTHER; note = 2'-O-methyl cytidine
  modified_base 33: mod_base = OTHER; note = Deoxyuridine phosphorothioate
  modified_base 34: mod_base = OTHER; note = 2'-O-methyl cytidine
  modified_base 35: mod_base = OTHER; note = Deoxycytidine phosphorothioate
  modified_base 37: mod_base = OTHER; note = Deoxyuridine phosphorothioate
  modified_base 38: mod_base = OTHER; note = 2'-O-methyl uridine
  modified_base 39: mod_base = OTHER; note = 2'-O-methyl uridine phosphorothioate
  modified_base 40: mod_base = OTHER; note = 2'-O-methyl cytidine phosphorothioate
  modified_base 41: mod_base = OTHER; note = 2'-O-methyl uridine phosphorothioate
  modified_base 42: mod_base = OTHER; note = 2'-O-methyl cytidine
  misc_feature 1..25: note = RNA
  misc_feature 26..28: note = DNA
  misc_feature 29..32: note = RNA
  misc_feature 33: note = DNA
  misc_feature 34: note = RNA
  misc_feature 35: note = DNA
  misc_feature 36: note = RNA
  misc_feature 37: note = DNA
  misc_feature 38..42: note = RNA

SEQ ID NO: 246 - DNA, 42 bp, synthetic construct; identical to SEQ ID NO: 174
  source 1..42: mol_type = other DNA
  modified_base 1: mod_base = OTHER; note = 2'-O-methyl cytidine phosphorothioate
  modified_base 2: mod_base = OTHER; note = 2'-O-methyl uridine phosphorothioate
  modified_base 3: mod_base = OTHER; note = 2'-O-methyl guanosine phosphorothioate
  modified_base 4: mod_base = OTHER; note = 2'-O-methyl adenosine
  modified_base 5: mod_base = OTHER; note = 2'-O-methyl adenosine
  modified_base 9: mod_base = OTHER; note = 2'-O-methyl guanosine
  modified_base 10: mod_base = OTHER; note = 2'-O-methyl uridine
  modified_base 11: mod_base = OTHER; note = 2'-O-methyl guanosine
  modified_base 13: mod_base = OTHER; note = 2'-O-methyl cytidine
  modified_base 18: mod_base = OTHER; note = 2'-O-methyl uridine
  modified_base 22: mod_base = OTHER; note = 2'-O-methyl uridine
  modified_base 25: mod_base = OTHER; note = 2'-O-methyl guanosine
  modified_base 26: mod_base = OTHER; note = Deoxyuridine phosphorothioate
  modified_base 27: mod_base = OTHER; note = Deoxyuridine phosphorothioate
  modified_base 28: mod_base = OTHER; note = Deoxyguanosine phosphorothioate
  modified_base 29: mod_base = OTHER; note = 2'-O-methyl uridine
  modified_base 30: mod_base = OTHER; note = 2'-O-methyl adenosine
  modified_base 31: mod_base = OTHER; note = 2'-O-methyl guanosine
  modified_base 32: mod_base = OTHER; note = 2'-O-methyl cytidine
  modified_base 33: mod_base = OTHER; note = Deoxyuridine phosphorothioate
  modified_base 34: mod_base = OTHER; note = Deoxycytidine phosphorothioate
  modified_base 35: mod_base = OTHER; note = 2'-O-methyl cytidine
  modified_base 37: mod_base = OTHER; note = Deoxyuridine phosphorothioate
  modified_base 38: mod_base = OTHER; note = 2'-O-methyl uridine
  modified_base 39: mod_base = OTHER; note = 2'-O-methyl uridine phosphorothioate
  modified_base 40: mod_base = OTHER; note = 2'-O-methyl cytidine phosphorothioate
  modified_base 41: mod_base = OTHER; note = 2'-O-methyl uridine phosphorothioate
  modified_base 42: mod_base = OTHER; note = 2'-O-methyl cytidine
  misc_feature 1..25: note = RNA
  misc_feature 26..28: note = DNA
  misc_feature 29..32: note = RNA
  misc_feature 33..34: note = DNA
  misc_feature 35..36: note = RNA
  misc_feature 37: note = DNA
  misc_feature 38..42: note = RNA

SEQ ID NO: 247 - DNA, 42 bp, synthetic construct; identical to SEQ ID NO: 174
  source 1..42: mol_type = other DNA
  modified_base 1: mod_base = OTHER; note = 2'-O-methyl cytidine phosphorothioate
  modified_base 2: mod_base = OTHER; note = 2'-O-methyl uridine phosphorothioate
  modified_base 3: mod_base = OTHER; note = 2'-O-methyl guanosine phosphorothioate
  modified_base 4: mod_base = OTHER; note = 2'-O-methyl adenosine
  modified_base 5: mod_base = OTHER; note = 2'-O-methyl adenosine
  modified_base 9: mod_base = OTHER; note = 2'-O-methyl guanosine
  modified_base 10: mod_base = OTHER; note = 2'-O-methyl uridine
  modified_base 11: mod_base = OTHER; note = 2'-O-methyl guanosine
  modified_base 13: mod_base = OTHER; note = 2'-O-methyl cytidine
  modified_base 18: mod_base = OTHER; note = 2'-O-methyl uridine
  modified_base 22: mod_base = OTHER; note = 2'-O-methyl uridine
  modified_base 25: mod_base = OTHER; note = 2'-O-methyl guanosine
  modified_base 26: mod_base = OTHER; note = Deoxyuridine phosphorothioate
  modified_base 27: mod_base = OTHER; note = Deoxyuridine phosphorothioate
  modified_base 28: mod_base = OTHER; note = Deoxyguanosine phosphorothioate
  modified_base 29: mod_base = OTHER; note = 2'-O-methyl uridine
  modified_base 30: mod_base = OTHER; note = 2'-O-methyl adenosine
  modified_base 31: mod_base = OTHER; note = 2'-O-methyl guanosine
  modified_base 32: mod_base = OTHER; note = 2'-O-methyl cytidine
  modified_base 33: mod_base = OTHER; note = 2'-O-methyl uridine
  modified_base 34: mod_base = OTHER; note = 2'-O-methyl cytidine
  modified_base 35: mod_base = OTHER; note = Deoxycytidine phosphorothioate
  modified_base 37: mod_base = OTHER; note = Deoxyuridine phosphorothioate
  modified_base 38: mod_base = OTHER; note = 2'-O-methyl uridine
  modified_base 39: mod_base = OTHER; note = 2'-O-methyl uridine phosphorothioate
  modified_base 40: mod_base = OTHER; note = 2'-O-methyl cytidine phosphorothioate
  modified_base 41: mod_base = OTHER; note = 2'-O-methyl uridine phosphorothioate
  modified_base 42: mod_base = OTHER; note = 2'-O-methyl cytidine
  misc_feature 1..25: note = RNA
  misc_feature 26..28: note = DNA
  misc_feature 29..34: note = RNA
  misc_feature 35: note = DNA
  misc_feature 36: note = RNA
  misc_feature 37: note = DNA
  misc_feature 38..42: note = RNA

SEQ ID NO: 248 - DNA, 42 bp, synthetic construct; identical to SEQ ID NO: 174
  source 1..42: mol_type = other DNA
  modified_base 1: mod_base = OTHER; note = 2'-O-methyl cytidine phosphorothioate
  modified_base 2: mod_base = OTHER; note = 2'-O-methyl uridine phosphorothioate
  modified_base 3: mod_base = OTHER; note = 2'-O-methyl guanosine phosphorothioate
  modified_base 4: mod_base = OTHER; note = 2'-O-methyl adenosine
  modified_base 5: mod_base = OTHER; note = 2'-O-methyl adenosine
  modified_base 9: mod_base = OTHER; note = 2'-O-methyl guanosine
  modified_base 10: mod_base = OTHER; note = 2'-O-methyl uridine
  modified_base 11: mod_base = OTHER; note = 2'-O-methyl guanosine
  modified_base 13: mod_base = OTHER; note = 2'-O-methyl cytidine
  modified_base 18: mod_base = OTHER; note = 2'-O-methyl uridine
  modified_base 22: mod_base = OTHER; note = 2'-O-methyl uridine
  modified_base 25: mod_base = OTHER; note = 2'-O-methyl guanosine
  modified_base 26: mod_base = OTHER; note = Deoxyuridine phosphorothioate
  modified_base 27: mod_base = OTHER; note = Deoxyuridine phosphorothioate
  modified_base 28: mod_base = OTHER; note = Deoxyguanosine phosphorothioate
  modified_base 29: mod_base = OTHER; note = 2'-O-methyl uridine
  modified_base 30: mod_base = OTHER; note = 2'-O-methyl adenosine
  modified_base 31: mod_base = OTHER; note = 2'-O-methyl guanosine
  modified_base 32: mod_base = OTHER; note = 2'-O-methyl cytidine
  modified_base 33: mod_base = OTHER; note = 2'-O-methyl uridine
  modified_base 34: mod_base = OTHER; note = Deoxycytidine phosphorothioate
  modified_base 35: mod_base = OTHER; note = 2'-O-methyl cytidine
  modified_base 37: mod_base = OTHER; note = Deoxyuridine phosphorothioate
  modified_base 38: mod_base = OTHER; note = 2'-O-methyl uridine
  modified_base 39: mod_base = OTHER; note = 2'-O-methyl uridine phosphorothioate
  modified_base 40: mod_base = OTHER; note = 2'-O-methyl cytidine phosphorothioate
  modified_base 41: mod_base = OTHER; note = 2'-O-methyl uridine phosphorothioate
  modified_base 42: mod_base = OTHER; note = 2'-O-methyl cytidine
  misc_feature 1..25: note = RNA
  misc_feature 26..28: note = DNA
  misc_feature 29..33: note = RNA
  misc_feature 34: note = DNA
  misc_feature 35..36: note = RNA
  misc_feature 37: note = DNA
  misc_feature 38..42: note = RNA

SEQ ID NO: 249 - DNA, 42 bp, synthetic construct; identical to SEQ ID NO: 174
  source 1..42: mol_type = other DNA
  modified_base 1: mod_base = OTHER; note = 2'-O-methyl cytidine phosphorothioate
  modified_base 2: mod_base = OTHER; note = 2'-O-methyl uridine phosphorothioate
  modified_base 3: mod_base = OTHER; note = 2'-O-methyl guanosine phosphorothioate
  modified_base 4: mod_base = OTHER; note = 2'-O-methyl adenosine
  modified_base 5: mod_base = OTHER; note = 2'-O-methyl adenosine
  modified_base 9: mod_base = OTHER; note = 2'-O-methyl guanosine
  modified_base 10: mod_base = OTHER; note = 2'-O-methyl uridine
  modified_base 11: mod_base = OTHER; note = 2'-O-methyl guanosine
  modified_base 13: mod_base = OTHER; note = 2'-O-methyl cytidine
  modified_base 18: mod_base = OTHER; note = 2'-O-methyl uridine
  modified_base 22: mod_base = OTHER; note = 2'-O-methyl uridine
  modified_base 25: mod_base = OTHER; note = 2'-O-methyl guanosine
  modified_base 26: mod_base = OTHER; note = Deoxyuridine phosphorothioate
  modified_base 27: mod_base = OTHER; note = Deoxyuridine phosphorothioate
  modified_base 28: mod_base = OTHER; note = Deoxyguanosine phosphorothioate
  modified_base 29: mod_base = OTHER; note = 2'-O-methyl uridine
  modified_base 30: mod_base = OTHER; note = 2'-O-methyl adenosine
  modified_base 31: mod_base = OTHER; note = 2'-O-methyl guanosine
  modified_base 32: mod_base = OTHER; note = 2'-O-methyl cytidine
  modified_base 33: mod_base = OTHER; note = Deoxyuridine phosphorothioate
  modified_base 34: mod_base = OTHER; note = 2'-O-methyl cytidine
  modified_base 35: mod_base = OTHER; note = 2'-O-methyl cytidine
  modified_base 37: mod_base = OTHER; note = Deoxyuridine phosphorothioate
  modified_base 38: mod_base = OTHER; note = 2'-O-methyl uridine
  modified_base 39: mod_base = OTHER; note = 2'-O-methyl uridine phosphorothioate
  modified_base 40: mod_base = OTHER; note = 2'-O-methyl cytidine phosphorothioate
  modified_base 41: mod_base = OTHER; note = 2'-O-methyl uridine phosphorothioate
  modified_base 42: mod_base = OTHER; note = 2'-O-methyl cytidine
  misc_feature 1..25: note = RNA
  misc_feature 26..28: note = DNA
  misc_feature 29..32: note = RNA
  misc_feature 33: note = DNA
  misc_feature 34..36: note = RNA
  misc_feature 37: note = DNA
  misc_feature 38..42: note = RNA

SEQ ID NO: 250 - DNA, 42 bp, synthetic construct; identical to SEQ ID NO: 174
  source 1..42: mol_type = other DNA
  modified_base 1: mod_base = OTHER; note = 2'-O-methyl cytidine phosphorothioate
  modified_base 2: mod_base = OTHER; note = 2'-O-methyl uridine phosphorothioate
  modified_base 3: mod_base = OTHER; note = 2'-O-methyl guanosine phosphorothioate
  modified_base 4: mod_base = OTHER; note = 2'-O-methyl adenosine
  modified_base 5: mod_base = OTHER; note = 2'-O-methyl adenosine
  modified_base 9: mod_base = OTHER; note = 2'-O-methyl guanosine
  modified_base 10: mod_base = OTHER; note = 2'-O-methyl uridine
  modified_base 11: mod_base = OTHER; note = 2'-O-methyl guanosine
  modified_base 13: mod_base = OTHER; note = 2'-O-methyl cytidine
  modified_base 18: mod_base = OTHER; note = 2'-O-methyl uridine
  modified_base 22: mod_base = OTHER; note = 2'-O-methyl uridine
  modified_base 25: mod_base = OTHER; note = 2'-O-methyl guanosine
  modified_base 26: mod_base = OTHER; note = Deoxyuridine phosphorothioate
  modified_base 27: mod_base = OTHER; note = Deoxyuridine phosphorothioate
  modified_base 28: mod_base = OTHER; note = Deoxyguanosine phosphorothioate
  modified_base 29: mod_base = OTHER; note = 2'-O-methyl uridine
  modified_base 30: mod_base = OTHER; note = 2'-O-methyl adenosine
  modified_base 31: mod_base = OTHER; note = 2'-O-methyl guanosine
  modified_base 32: mod_base = OTHER; note = 2'-O-methyl cytidine
  modified_base 33: mod_base = OTHER; note = 2'-O-methyl uridine
  modified_base 34: mod_base = OTHER; note = 2'-O-methyl cytidine
  modified_base 35: mod_base = OTHER; note = 2'-O-methyl cytidine
  modified_base 37: mod_base = OTHER; note = Deoxyuridine phosphorothioate
  modified_base 38: mod_base = OTHER; note = 2'-O-methyl uridine
  modified_base 39: mod_base = OTHER; note = 2'-O-methyl uridine phosphorothioate
  modified_base 40: mod_base = OTHER; note = 2'-O-methyl cytidine phosphorothioate
  modified_base 41: mod_base = OTHER; note = 2'-O-methyl uridine phosphorothioate
  modified_base 42: mod_base = OTHER; note = 2'-O-methyl cytidine
  misc_feature 1..25: note = RNA
  misc_feature 26..28: note = DNA
  misc_feature 29..36: note = RNA
  misc_feature 37: note = DNA
  misc_feature 38..42: note = RNA

SEQ ID NO: 251 - RNA, 42 nt, synthetic construct; identical to SEQ ID NO: 126
  source 1..42: mol_type = other RNA
  modified_base 1: mod_base = OTHER; note = 2'-O-methyl cytidine phosphorothioate
  modified_base 2: mod_base = OTHER; note = 2'-O-methyl uridine phosphorothioate
  modified_base 3: mod_base = OTHER; note = 2'-O-methyl guanosine phosphorothioate
  modified_base 4: mod_base = OTHER; note = 2'-O-methyl adenosine
  modified_base 5: mod_base = OTHER; note = 2'-O-methyl adenosine
  modified_base 6: mod_base = OTHER; note = 2'-O-methyl cytidine
  modified_base 7: mod_base = OTHER; note = 2'-fluoro uridine
  modified_base 8: mod_base = OTHER; note = 2'-O-methyl uridine
  modified_base 9: mod_base = OTHER; note = 2'-O-methyl guanosine
  modified_base 10: mod_base = OTHER; note = 2'-O-methyl uridine
  modified_base 11: mod_base = OTHER; note = 2'-O-methyl guanosine
  modified_base 13: mod_base = OTHER; note = 2'-O-methyl cytidine
  modified_base 18: mod_base = OTHER; note = 2'-O-methyl uridine
  modified_base 22: mod_base = OTHER; note = 2'-O-methyl uridine
  modified_base 25: mod_base = OTHER; note = 2'-O-methyl guanosine
  modified_base 29: mod_base = OTHER; note = 2'-O-methyl uridine
  modified_base 30: mod_base = OTHER; note = 2'-O-methyl adenosine
  modified_base 31: mod_base = OTHER; note = 2'-O-methyl guanosine
  modified_base 32: mod_base = OTHER; note = 2'-O-methyl cytidine
  modified_base 38: mod_base = OTHER; note = 2'-O-methyl uridine
  modified_base 39: mod_base = OTHER; note = 2'-O-methyl uridine phosphorothioate
  modified_base 40: mod_base = OTHER; note = 2'-O-methyl cytidine phosphorothioate
  modified_base 41: mod_base = OTHER; note = 2'-O-methyl uridine phosphorothioate
  modified_base 42: mod_base = OTHER; note = 2'-O-methyl cytidine

SEQ ID NO: 252 - DNA, 42 bp, synthetic construct; identical to SEQ ID NO: 174
  source 1..42: mol_type = other DNA
  modified_base 1: mod_base = OTHER; note = 2'-O-methyl cytidine phosphorothioate
  modified_base 2: mod_base = OTHER; note = 2'-O-methyl uridine phosphorothioate
  modified_base 3: mod_base = OTHER; note = 2'-O-methyl guanosine phosphorothioate
  modified_base 4: mod_base = OTHER; note = 2'-O-methyl adenosine
  modified_base 5: mod_base = OTHER; note = 2'-O-methyl adenosine
  modified_base 6: mod_base = OTHER; note = 2'-O-methyl cytidine
  modified_base 7: mod_base = OTHER; note = 2'-fluoro uridine
  modified_base 8: mod_base = OTHER; note = Deoxyuridine phosphorothioate
  modified_base 9: mod_base = OTHER; note = 2'-O-methyl guanosine
  modified_base 10: mod_base = OTHER; note = 2'-O-methyl uridine
  modified_base 11: mod_base = OTHER; note = 2'-O-methyl guanosine
  modified_base 13: mod_base = OTHER; note = 2'-O-methyl cytidine
  modified_base 18: mod_base = OTHER; note = 2'-O-methyl uridine
  modified_base 22: mod_base = OTHER; note = 2'-O-methyl uridine
  modified_base 25: mod_base = OTHER; note = 2'-O-methyl guanosine
  modified_base 29: mod_base = OTHER; note = 2'-O-methyl uridine
  modified_base 30: mod_base = OTHER; note = 2'-O-methyl adenosine
  modified_base 31: mod_base = OTHER; note = 2'-O-methyl guanosine
  modified_base 32: mod_base = OTHER; note = 2'-O-methyl cytidine
  modified_base 38: mod_base = OTHER; note = 2'-O-methyl uridine
  modified_base 39: mod_base = OTHER; note = 2'-O-methyl uridine phosphorothioate
  modified_base 40: mod_base = OTHER; note = 2'-O-methyl cytidine phosphorothioate
  modified_base 41: mod_base = OTHER; note = 2'-O-methyl uridine phosphorothioate
  modified_base 42: mod_base = OTHER; note = 2'-O-methyl cytidine
  misc_feature 1..7: note = RNA
  misc_feature 8: note = DNA
  misc_feature 9..42: note = RNA

SEQ ID NO: 253 - DNA, 42 bp, synthetic construct; identical to SEQ ID NO: 174
  source 1..42: mol_type = other DNA
  modified_base 1: mod_base = OTHER; note = 2'-O-methyl cytidine phosphorothioate
  modified_base 2: mod_base = OTHER; note = 2'-O-methyl uridine phosphorothioate
  modified_base 3: mod_base = OTHER; note = 2'-O-methyl guanosine phosphorothioate
  modified_base 4: mod_base = OTHER; note = 2'-O-methyl adenosine
  modified_base 5: mod_base = OTHER; note = 2'-O-methyl adenosine
  modified_base 6: mod_base = OTHER; note = 2'-O-methyl cytidine
  modified_base 7: mod_base = OTHER; note = Deoxyuridine phosphorothioate
  modified_base 8: mod_base = OTHER; note = 2'-O-methyl uridine
  modified_base 9: mod_base = OTHER; note = 2'-O-methyl guanosine
  modified_base 10: mod_base = OTHER; note = 2'-O-methyl uridine
  modified_base 11: mod_base = OTHER; note = 2'-O-methyl guanosine
  modified_base 13: mod_base = OTHER; note = 2'-O-methyl cytidine
  modified_base 18: mod_base = OTHER; note = 2'-O-methyl uridine
  modified_base 22: mod_base = OTHER; note = 2'-O-methyl uridine
  modified_base 25: mod_base = OTHER; note = 2'-O-methyl guanosine
  modified_base 29: mod_base = OTHER; note = 2'-O-methyl uridine
  modified_base 30: mod_base = OTHER; note = 2'-O-methyl adenosine
  modified_base 31: mod_base = OTHER; note = 2'-O-methyl guanosine
  modified_base 32: mod_base = OTHER; note = 2'-O-methyl cytidine
  modified_base 38: mod_base = OTHER; note = 2'-O-methyl uridine
  modified_base 39: mod_base = OTHER; note = 2'-O-methyl uridine phosphorothioate
  modified_base 40: mod_base = OTHER; note = 2'-O-methyl cytidine phosphorothioate
  modified_base 41: mod_base = OTHER; note = 2'-O-methyl uridine phosphorothioate
  modified_base 42: mod_base = OTHER; note = 2'-O-methyl cytidine
  misc_feature 1..6: note = RNA
  misc_feature 7: note = DNA
  misc_feature 8..42: note = RNA

SEQ ID NO: 254 - DNA, 42 bp, synthetic construct; identical to SEQ ID NO: 174
  source 1..42: mol_type = other DNA
  modified_base 1: mod_base = OTHER; note = 2'-O-methyl cytidine phosphorothioate
  modified_base 2: mod_base = OTHER; note = 2'-O-methyl uridine phosphorothioate
  modified_base 3: mod_base = OTHER; note = 2'-O-methyl guanosine phosphorothioate
  modified_base 4: mod_base = OTHER; note = 2'-O-methyl adenosine
  modified_base 5: mod_base = OTHER; note = 2'-O-methyl adenosine
  modified_base 6: mod_base = OTHER; note = 2'-O-methyl cytidine
  modified_base 7: mod_base = OTHER; note = Deoxyuridine phosphorothioate
  modified_base 8: mod_base = OTHER; note = Deoxyuridine phosphorothioate
  modified_base 9: mod_base = OTHER; note = 2'-O-methyl guanosine
  modified_base 10: mod_base = OTHER; note = 2'-O-methyl uridine
  modified_base 11: mod_base = OTHER; note = 2'-O-methyl guanosine
  modified_base 13: mod_base = OTHER; note = 2'-O-methyl cytidine
  modified_base 18: mod_base = OTHER; note = 2'-O-methyl uridine
  modified_base 22: mod_base = OTHER; note = 2'-O-methyl uridine
  modified_base 25: mod_base = OTHER; note = 2'-O-methyl guanosine
  modified_base 29: mod_base = OTHER; note = 2'-O-methyl uridine
  modified_base 30: mod_base = OTHER; note = 2'-O-methyl adenosine
  modified_base 31: mod_base = OTHER; note = 2'-O-methyl guanosine
  modified_base 32: mod_base = OTHER; note = 2'-O-methyl cytidine
  modified_base 38: mod_base = OTHER; note = 2'-O-methyl uridine
  modified_base 39: mod_base = OTHER; note = 2'-O-methyl uridine phosphorothioate
  modified_base 40: mod_base = OTHER; note = 2'-O-methyl cytidine phosphorothioate
  modified_base 41: mod_base = OTHER; note = 2'-O-methyl uridine phosphorothioate
  modified_base 42: mod_base = OTHER; note = 2'-O-methyl cytidine
  misc_feature 1..6: note = RNA
  misc_feature 7..8: note = DNA
  misc_feature 9..42: note = RNA

SEQ ID NO: 255 - RNA, 42 nt, synthetic construct; identical to SEQ ID NO: 126
  source 1..42: mol_type = other RNA
  modified_base 1: mod_base = OTHER; note = 2'-O-methyl cytidine phosphorothioate
  modified_base 2: mod_base = OTHER; note = 2'-O-methyl uridine phosphorothioate
  modified_base 3: mod_base = OTHER; note = 2'-O-methyl guanosine phosphorothioate
  modified_base 4: mod_base = OTHER; note = 2'-O-methyl adenosine
  modified_base 5: mod_base = OTHER; note = 2'-O-methyl adenosine
  modified_base 6: mod_base = OTHER; note = 2'-fluoro cytidine
  modified_base 7: mod_base = OTHER; note = 2'-fluoro uridine
  modified_base 8: mod_base = OTHER; note = 2'-O-methyl uridine
  modified_base 9: mod_base = OTHER; note = 2'-O-methyl guanosine
  modified_base 10: mod_base = OTHER; note = 2'-O-methyl uridine
  modified_base 11: mod_base = OTHER; note = 2'-O-methyl guanosine
  modified_base 13: mod_base = OTHER; note = 2'-O-methyl cytidine
  modified_base 18: mod_base = OTHER; note = 2'-O-methyl uridine
  modified_base 22: mod_base = OTHER; note = 2'-O-methyl uridine
  modified_base 25: mod_base = OTHER; note = 2'-O-methyl guanosine
  modified_base 29: mod_base = OTHER; note = 2'-O-methyl uridine
  modified_base 30: mod_base = OTHER; note = 2'-O-methyl adenosine
  modified_base 31: mod_base = OTHER; note = 2'-O-methyl guanosine
  modified_base 32: mod_base = OTHER; note = 2'-O-methyl cytidine
  modified_base 38: mod_base = OTHER; note = 2'-O-methyl uridine
  modified_base 39: mod_base = OTHER; note = 2'-O-methyl uridine phosphorothioate
  modified_base 40: mod_base = OTHER; note = 2'-O-methyl cytidine phosphorothioate
  modified_base 41: mod_base = OTHER; note = 2'-O-methyl uridine phosphorothioate
  modified_base 42: mod_base = OTHER; note = 2'-O-methyl cytidine
  misc_feature 1..42: note = RNA

SEQ ID NO: 256 - DNA, 42 bp, synthetic construct; identical to SEQ ID NO: 174
  source 1..42: mol_type = other DNA
  modified_base 1: mod_base = OTHER; note = 2'-O-methyl cytidine phosphorothioate
  modified_base 2: mod_base = OTHER; note = 2'-O-methyl uridine phosphorothioate
  modified_base 3: mod_base = OTHER; note = 2'-O-methyl guanosine phosphorothioate
  modified_base 4: mod_base = OTHER; note = 2'-O-methyl adenosine
  modified_base 5: mod_base = OTHER; note = 2'-O-methyl adenosine
  modified_base 6: mod_base = OTHER; note = 2'-fluoro cytidine
  modified_base 7: mod_base = OTHER; note = 2'-fluoro uridine
  modified_base 8: mod_base = OTHER; note = Deoxyuridine phosphorothioate
  modified_base 9: mod_base = OTHER; note = 2'-O-methyl guanosine
  modified_base 10: mod_base = OTHER; note = 2'-O-methyl uridine
  modified_base 11: mod_base = OTHER; note = 2'-O-methyl guanosine
  modified_base 13: mod_base = OTHER; note = 2'-O-methyl cytidine
  modified_base 18: mod_base = OTHER; note = 2'-O-methyl uridine
  modified_base 22: mod_base = OTHER; note = 2'-O-methyl uridine
  modified_base 25: mod_base = OTHER; note = 2'-O-methyl guanosine
  modified_base 29: mod_base = OTHER; note = 2'-O-methyl uridine
  modified_base 30: mod_base = OTHER; note = 2'-O-methyl adenosine
  modified_base 31: mod_base = OTHER; note = 2'-O-methyl guanosine
  modified_base 32: mod_base = OTHER; note = 2'-O-methyl cytidine
  modified_base 38: mod_base = OTHER; note = 2'-O-methyl uridine
  modified_base 39: mod_base = OTHER; note = 2'-O-methyl uridine phosphorothioate
  modified_base 40: mod_base = OTHER; note = 2'-O-methyl cytidine phosphorothioate
  modified_base 41: mod_base = OTHER; note = 2'-O-methyl uridine phosphorothioate
  modified_base 42: mod_base = OTHER; note = 2'-O-methyl cytidine
  misc_feature 1..7: note = RNA
  misc_feature 8: note = DNA
  misc_feature 9..42: note = RNA

SEQ ID NO: 257 - DNA, 42 bp, synthetic construct; identical to SEQ ID NO: 174
  source 1..42: mol_type = other DNA
  modified_base 1: mod_base = OTHER; note = 2'-O-methyl cytidine phosphorothioate
  modified_base 2: mod_base = OTHER; note = 2'-O-methyl uridine phosphorothioate
  modified_base 3: mod_base = OTHER; note = 2'-O-methyl guanosine phosphorothioate
  modified_base 4: mod_base = OTHER; note = 2'-O-methyl adenosine
  modified_base 5: mod_base = OTHER; note = 2'-O-methyl adenosine
  modified_base 6: mod_base = OTHER; note = 2'-fluoro cytidine
  modified_base 7: mod_base = OTHER; note = Deoxyuridine phosphorothioate
  modified_base 8: mod_base = OTHER; note = 2'-O-methyl uridine
  modified_base 9: mod_base = OTHER; note = 2'-O-methyl guanosine
  modified_base 10: mod_base = OTHER; note = 2'-O-methyl uridine
  modified_base 11: mod_base = OTHER; note = 2'-O-methyl guanosine
  modified_base 13: mod_base = OTHER; note = 2'-O-methyl cytidine
  modified_base 18: mod_base = OTHER; note = 2'-O-methyl uridine
  modified_base 22: mod_base = OTHER; note = 2'-O-methyl uridine
  modified_base 25: mod_base = OTHER; note = 2'-O-methyl guanosine
  modified_base 29: mod_base = OTHER; note = 2'-O-methyl uridine
  modified_base 30: mod_base = OTHER; note = 2'-O-methyl adenosine
  modified_base 31: mod_base = OTHER; note = 2'-O-methyl guanosine
  modified_base 32: mod_base = OTHER; note = 2'-O-methyl cytidine
  modified_base 38: mod_base = OTHER; note = 2'-O-methyl uridine
  modified_base 39: mod_base = OTHER; note = 2'-O-methyl uridine phosphorothioate
  modified_base 40: mod_base = OTHER; note = 2'-O-methyl cytidine phosphorothioate
  modified_base 41: mod_base = OTHER; note = 2'-O-methyl uridine phosphorothioate
  modified_base 42: mod_base = OTHER; note = 2'-O-methyl cytidine
  misc_feature 1..6: note = RNA
  misc_feature 7: note = DNA
  misc_feature 8..42: note = RNA

SEQ ID NO: 258 - DNA, 42 bp, synthetic construct; identical to SEQ ID NO: 174
  source 1..42: mol_type = other DNA
  modified_base 1: mod_base = OTHER; note = 2'-O-methyl cytidine phosphorothioate
  modified_base 2: mod_base = OTHER; note = 2'-O-methyl uridine phosphorothioate
  modified_base 3: mod_base = OTHER; note = 2'-O-methyl guanosine phosphorothioate
  modified_base 4: mod_base = OTHER; note = 2'-O-methyl adenosine
  modified_base 5: mod_base = OTHER; note = 2'-O-methyl adenosine
  modified_base 6: mod_base = OTHER; note = 2'-fluoro cytidine
  modified_base 7: mod_base = OTHER; note = Deoxyuridine phosphorothioate
  modified_base 8: mod_base = OTHER; note = Deoxyuridine phosphorothioate
  modified_base 9: mod_base = OTHER; note = 2'-O-methyl guanosine
  modified_base 10: mod_base = OTHER; note = 2'-O-methyl uridine
  modified_base 11: mod_base = OTHER; note = 2'-O-methyl guanosine
  modified_base 13: mod_base = OTHER; note = 2'-O-methyl cytidine
  modified_base 18: mod_base = OTHER; note = 2'-O-methyl uridine
  modified_base 22: mod_base = OTHER; note = 2'-O-methyl uridine
  modified_base 25: mod_base = OTHER; note = 2'-O-methyl guanosine
  modified_base 29: mod_base = OTHER; note = 2'-O-methyl uridine
  modified_base 30: mod_base = OTHER; note = 2'-O-methyl adenosine
  modified_base 31: mod_base = OTHER; note = 2'-O-methyl guanosine
  modified_base 32: mod_base = OTHER; note = 2'-O-methyl cytidine
  modified_base 38: mod_base = OTHER; note = 2'-O-methyl uridine
  modified_base 39: mod_base = OTHER; note = 2'-O-methyl uridine phosphorothioate
  modified_base 40: mod_base = OTHER; note = 2'-O-methyl cytidine phosphorothioate
  modified_base 41: mod_base = OTHER; note = 2'-O-methyl uridine phosphorothioate
  modified_base 42: mod_base = OTHER; note = 2'-O-methyl cytidine
  misc_feature 1..6: note = RNA
  misc_feature 7..8: note = DNA
  misc_feature 9..42: note = RNA

SEQ ID NO: 259 - RNA, 42 nt, synthetic construct; identical to SEQ ID NO: 126
  source 1..42: mol_type = other RNA
  modified_base 1: mod_base = OTHER; note = 2'-O-methyl cytidine phosphorothioate
  modified_base 2: mod_base = OTHER; note = 2'-O-methyl uridine phosphorothioate
  modified_base 3: mod_base = OTHER; note = 2'-O-methyl guanosine phosphorothioate
  modified_base 4: mod_base = OTHER; note = 2'-O-methyl adenosine
  modified_base 5: mod_base = OTHER; note = 2'-O-methyl adenosine
  modified_base 9: mod_base = OTHER; note = 2'-O-methyl guanosine
  modified_base 10: mod_base = OTHER; note = 2'-O-methyl uridine
  modified_base 11: mod_base = OTHER; note = 2'-O-methyl guanosine
  modified_base 13: mod_base = OTHER; note = 2'-O-methyl cytidine
  modified_base 14: mod_base = OTHER; note = 2'-fluoro cytidine
  modified_base 15: mod_base = OTHER; note = 2'-fluoro guanosine
  modified_base 16: mod_base = OTHER; note = 2'-fluoro uridine
  modified_base 17: mod_base = OTHER; note = 2'-fluoro uridine
  modified_base 18: mod_base = OTHER; note = 2'-O-methyl uridine
  modified_base 22: mod_base = OTHER; note = 2'-O-methyl uridine
  modified_base 25: mod_base = OTHER; note = 2'-O-methyl guanosine
  modified_base 29: mod_base = OTHER; note = 2'-O-methyl uridine
  modified_base 30: mod_base = OTHER; note = 2'-O-methyl adenosine
  modified_base 31: mod_base = OTHER; note = 2'-O-methyl guanosine
  modified_base 32: mod_base = OTHER; note = 2'-O-methyl cytidine
  modified_base 38: mod_base = OTHER; note = 2'-O-methyl uridine
  modified_base 39: mod_base = OTHER; note = 2'-O-methyl uridine phosphorothioate
  modified_base 40: mod_base = OTHER; note = 2'-O-methyl cytidine phosphorothioate
  modified_base 41: mod_base = OTHER; note = 2'-O-methyl uridine phosphorothioate
  modified_base 42: mod_base = OTHER; note = 2'-O-methyl cytidine

SEQ ID NO: 260 - RNA, 42 nt, synthetic construct; identical to SEQ ID NO: 126
  source 1..42: mol_type = other RNA
  modified_base 1: mod_base = OTHER; note = 2'-O-methyl cytidine phosphorothioate
  modified_base 2: mod_base = OTHER; note = 2'-O-methyl uridine phosphorothioate
  modified_base 3: mod_base = OTHER; note = 2'-O-methyl guanosine phosphorothioate
  modified_base 4: mod_base = OTHER; note = 2'-O-methyl adenosine
  modified_base 5: mod_base = OTHER; note = 2'-O-methyl adenosine
  modified_base 9: mod_base = OTHER; note = 2'-O-methyl guanosine
  modified_base 10: mod_base = OTHER; note = 2'-O-methyl uridine
  modified_base 11: mod_base = OTHER; note = 2'-O-methyl guanosine
  modified_base 13: mod_base = OTHER; note = 2'-O-methyl cytidine
  modified_base 14: mod_base = OTHER; note = 2'-fluoro cytidine
  modified_base 15: mod_base = OTHER; note = 2'-O-methyl guanosine
  modified_base 16: mod_base = OTHER; note = 2'-fluoro uridine
  modified_base 17: mod_base = OTHER; note = 2'-fluoro uridine
  modified_base 18: mod_base = OTHER; note = 2'-O-methyl uridine
  modified_base 22: mod_base = OTHER; note = 2'-O-methyl uridine
  modified_base 25: mod_base = OTHER; note = 2'-O-methyl guanosine
  modified_base 29: mod_base = OTHER; note = 2'-O-methyl uridine
  modified_base 30: mod_base = OTHER; note = 2'-O-methyl adenosine
  modified_base 31: mod_base = OTHER; note = 2'-O-methyl guanosine
  modified_base 32: mod_base = OTHER; note = 2'-O-methyl cytidine
  modified_base 38: mod_base = OTHER; note = 2'-O-methyl uridine
  modified_base 39: mod_base = OTHER; note = 2'-O-methyl uridine phosphorothioate
  modified_base 40: mod_base = OTHER; note = 2'-O-methyl cytidine phosphorothioate
  modified_base 41: mod_base = OTHER; note = 2'-O-methyl uridine phosphorothioate
  modified_base 42: mod_base = OTHER; note = 2'-O-methyl cytidine

SEQ ID NO: 261 - RNA, 42 nt, synthetic construct; identical to SEQ ID NO: 126
  source 1..42: mol_type = other RNA
  modified_base 1: mod_base = OTHER; note = 2'-O-methyl cytidine phosphorothioate
  modified_base 2: mod_base = OTHER; note = 2'-O-methyl uridine phosphorothioate
  modified_base 3: mod_base = OTHER; note = 2'-O-methyl guanosine phosphorothioate
  modified_base 4: mod_base = OTHER; note = 2'-O-methyl adenosine
  modified_base 5: mod_base = OTHER; note = 2'-O-methyl adenosine
  modified_base 9: mod_base = OTHER; note = 2'-O-methyl guanosine
  modified_base 10: mod_base = OTHER; note = 2'-O-methyl uridine
  modified_base 11: mod_base = OTHER; note = 2'-O-methyl guanosine
  modified_base 13: mod_base = OTHER; note = 2'-O-methyl cytidine
  modified_base 14: mod_base = OTHER; note = 2'-fluoro cytidine
  modified_base 15: mod_base = OTHER; note = 2'-fluoro guanosine
  modified_base 16: mod_base = OTHER; note = 2'-O-methyl uridine
  modified_base 17: mod_base = OTHER; note = 2'-fluoro uridine
  modified_base 18: mod_base = OTHER; note = 2'-O-methyl uridine
  modified_base 22: mod_base = OTHER; note = 2'-O-methyl uridine
  modified_base 25: mod_base = OTHER; note = 2'-O-methyl guanosine
  modified_base 29: mod_base = OTHER; note = 2'-O-methyl uridine
  modified_base 30: mod_base = OTHER; note = 2'-O-methyl adenosine
  modified_base 31: mod_base = OTHER; note = 2'-O-methyl guanosine
  modified_base 32: mod_base = OTHER; note = 2'-O-methyl cytidine
  modified_base 38: mod_base = OTHER; note = 2'-O-methyl uridine
  modified_base 39: mod_base = OTHER; note = 2'-O-methyl uridine phosphorothioate
  modified_base 40: mod_base = OTHER; note = 2'-O-methyl cytidine phosphorothioate
  modified_base 41: mod_base = OTHER; note = 2'-O-methyl uridine phosphorothioate
  modified_base 42: mod_base = OTHER; note = 2'-O-methyl cytidine

SEQ ID NO: 262 - RNA, 42 nt, synthetic construct; identical to SEQ ID NO: 126
  source 1..42: mol_type = other RNA
  modified_base 1: mod_base = OTHER; note = 2'-O-methyl cytidine phosphorothioate
  modified_base 2: mod_base = OTHER; note = 2'-O-methyl uridine phosphorothioate
  modified_base 3: mod_base = OTHER; note = 2'-O-methyl guanosine phosphorothioate
  modified_base 4: mod_base = OTHER; note = 2'-O-methyl adenosine
  modified_base 5: mod_base = OTHER; note = 2'-O-methyl adenosine
  modified_base 9: mod_base = OTHER; note = 2'-O-methyl guanosine
  modified_base 10: mod_base = OTHER; note = 2'-O-methyl uridine
  modified_base 11: mod_base = OTHER; note = 2'-O-methyl guanosine
  modified_base 13: mod_base = OTHER; note = 2'-O-methyl cytidine
  modified_base 14: mod_base = OTHER; note = 2'-fluoro cytidine
  modified_base 15: mod_base = OTHER; note = 2'-fluoro guanosine
  modified_base 16: mod_base = OTHER; note = 2'-fluoro uridine
  modified_base 17: mod_base = OTHER; note = 2'-O-methyl uridine
  modified_base 18: mod_base = OTHER; note = 2'-O-methyl uridine
  modified_base 22: mod_base = OTHER; note = 2'-O-methyl uridine
  modified_base 25: mod_base = OTHER; note = 2'-O-methyl guanosine
  modified_base 29: mod_base = OTHER; note = 2'-O-methyl uridine
  modified_base 30: mod_base = OTHER; note = 2'-O-methyl adenosine
  modified_base 31: mod_base = OTHER; note = 2'-O-methyl guanosine
  modified_base 32: mod_base = OTHER; note = 2'-O-methyl cytidine
  modified_base 38: mod_base = OTHER; note = 2'-O-methyl uridine
  modified_base 39: mod_base = OTHER; note = 2'-O-methyl uridine phosphorothioate
  modified_base 40: mod_base = OTHER; note = 2'-O-methyl cytidine phosphorothioate
  modified_base 41: mod_base = OTHER; note = 2'-O-methyl uridine phosphorothioate
  modified_base 42: mod_base = OTHER; note = 2'-O-methyl cytidine

SEQ ID NO: 263 - RNA, 42 nt, synthetic construct; identical to SEQ ID NO: 126
  source 1..42: mol_type = other RNA
  modified_base 1: mod_base = OTHER; note = 2'-O-methyl cytidine phosphorothioate
  modified_base 2: mod_base = OTHER; note = 2'-O-methyl uridine phosphorothioate
  modified_base 3: mod_base = OTHER; note = 2'-O-methyl guanosine phosphorothioate
  modified_base 4: mod_base = OTHER; note = 2'-O-methyl adenosine
  modified_base 5: mod_base = OTHER; note = 2'-O-methyl adenosine
  modified_base 9: mod_base = OTHER; note = 2'-O-methyl guanosine
  modified_base 10: mod_base = OTHER; note = 2'-O-methyl uridine
  modified_base 11: mod_base = OTHER; note = 2'-O-methyl guanosine
  modified_base 13: mod_base = OTHER; note = 2'-O-methyl cytidine
  modified_base 14: mod_base = OTHER; note = 2'-fluoro cytidine
  modified_base 15: mod_base = OTHER; note = 2'-O-methyl guanosine
  modified_base 16: mod_base = OTHER; note = 2'-O-methyl uridine
  modified_base 17: mod_base = OTHER; note = 2'-fluoro uridine
  modified_base 18: mod_base = OTHER; note = 2'-O-methyl uridine
  modified_base 22: mod_base = OTHER; note = 2'-O-methyl uridine
  modified_base 25: mod_base = OTHER; note = 2'-O-methyl guanosine
  modified_base 29: mod_base = OTHER; note = 2'-O-methyl uridine
  modified_base 30: mod_base = OTHER; note = 2'-O-methyl adenosine
  modified_base 31: mod_base = OTHER; note = 2'-O-methyl guanosine
  modified_base 32: mod_base = OTHER; note = 2'-O-methyl cytidine
  modified_base 38: mod_base = OTHER; note = 2'-O-methyl uridine
  modified_base 39: mod_base = OTHER; note = 2'-O-methyl uridine phosphorothioate
  modified_base 40: mod_base = OTHER; note = 2'-O-methyl cytidine phosphorothioate
  modified_base 41: mod_base = OTHER; note = 2'-O-methyl uridine phosphorothioate
  modified_base 42: mod_base = OTHER; note = 2'-O-methyl cytidine

SEQ ID NO: 264 - RNA, 42 nt, synthetic construct; identical to SEQ ID NO: 126
  source 1..42: mol_type = other RNA
  modified_base 1: mod_base = OTHER; note = 2'-O-methyl cytidine phosphorothioate
  modified_base 2: mod_base = OTHER; note = 2'-O-methyl uridine phosphorothioate
  modified_base 3: mod_base = OTHER; note = 2'-O-methyl guanosine phosphorothioate
  modified_base 4: mod_base = OTHER; note = 2'-O-methyl adenosine
  modified_base 5: mod_base = OTHER; note = 2'-O-methyl adenosine
  modified_base 9: mod_base = OTHER; note = 2'-O-methyl guanosine
  modified_base 10: mod_base = OTHER; note = 2'-O-methyl uridine
  modified_base 11: mod_base = OTHER; note = 2'-O-methyl guanosine
  modified_base 13: mod_base = OTHER; note = 2'-O-methyl cytidine
  modified_base 14: mod_base = OTHER; note = 2'-fluoro cytidine
  modified_base 15: mod_base = OTHER; note = 2'-fluoro guanosine
  modified_base 16: mod_base = OTHER; note = 2'-O-methyl uridine
  modified_base 17: mod_base = OTHER; note = 2'-O-methyl uridine
  modified_base 18: mod_base = OTHER; note = 2'-O-methyl uridine
  modified_base 22: mod_base = OTHER; note = 2'-O-methyl uridine
  modified_base 25: mod_base = OTHER; note = 2'-O-methyl guanosine
  modified_base 29: mod_base = OTHER; note = 2'-O-methyl uridine
  modified_base 30: mod_base = OTHER; note = 2'-O-methyl adenosine
  modified_base 31: mod_base = OTHER; note = 2'-O-methyl guanosine
  modified_base 32: mod_base = OTHER; note = 2'-O-methyl cytidine
  modified_base 38: mod_base = OTHER; note = 2'-O-methyl uridine
  modified_base 39: mod_base = OTHER; note = 2'-O-methyl uridine phosphorothioate
  modified_base 40: mod_base = OTHER; note = 2'-O-methyl cytidine phosphorothioate
  modified_base 41: mod_base = OTHER; note = 2'-O-methyl uridine phosphorothioate
  modified_base 42: mod_base = OTHER; note = 2'-O-methyl cytidine

SEQ ID NO: 265 - RNA, 42 nt, synthetic construct; identical to SEQ ID NO: 126
  source 1..42: mol_type = other RNA
  modified_base 1: mod_base = OTHER; note = 2'-O-methyl cytidine phosphorothioate
  modified_base 2: mod_base = OTHER; note = 2'-O-methyl uridine phosphorothioate
  modified_base 3: mod_base = OTHER; note = 2'-O-methyl guanosine phosphorothioate
  modified_base 4: mod_base = OTHER; note = 2'-O-methyl adenosine
  modified_base 5: mod_base = OTHER; note = 2'-O-methyl adenosine
  modified_base 9: mod_base = OTHER; note = 2'-O-methyl guanosine
  modified_base 10: mod_base = OTHER; note = 2'-O-methyl uridine
  modified_base 11: mod_base = OTHER; note = 2'-O-methyl guanosine
  modified_base 13: mod_base = OTHER; note = 2'-O-methyl cytidine
  modified_base 14: mod_base = OTHER; note = 2'-fluoro cytidine
  modified_base 15: mod_base = OTHER; note = 2'-O-methyl guanosine
  modified_base 16: mod_base = OTHER; note = 2'-fluoro uridine
  modified_base 17: mod_base = OTHER; note = 2'-O-methyl uridine
  modified_base 18: mod_base = OTHER; note = 2'-O-methyl uridine
  modified_base 22: mod_base = OTHER; note = 2'-O-methyl uridine
  modified_base 25: mod_base = OTHER; note = 2'-O-methyl guanosine
  modified_base 29: mod_base = OTHER; note = 2'-O-methyl uridine
  modified_base 30: mod_base = OTHER; note = 2'-O-methyl adenosine
  modified_base 31: mod_base = OTHER; note = 2'-O-methyl guanosine
  modified_base 32: mod_base = OTHER; note = 2'-O-methyl cytidine
  modified_base 38: mod_base = OTHER; note = 2'-O-methyl uridine
  modified_base 39: mod_base = OTHER; note = 2'-O-methyl uridine phosphorothioate
  modified_base 40: mod_base = OTHER; note = 2'-O-methyl cytidine phosphorothioate
  modified_base 41: mod_base = OTHER; note = 2'-O-methyl uridine phosphorothioate
  modified_base 42: mod_base = OTHER; note = 2'-O-methyl cytidine

SEQ ID NO: 266 - RNA, 42 nt, synthetic construct; identical to SEQ ID NO: 126
  source 1..42: mol_type = other RNA
  modified_base 1: mod_base = OTHER; note = 2'-O-methyl cytidine phosphorothioate
  modified_base 2: mod_base = OTHER; note = 2'-O-methyl uridine phosphorothioate
  modified_base 3: mod_base = OTHER; note = 2'-O-methyl guanosine phosphorothioate
  modified_base 4: mod_base = OTHER; note = 2'-O-methyl adenosine
  modified_base 5: mod_base = OTHER; note = 2'-O-methyl adenosine
  modified_base 9: mod_base = OTHER; note = 2'-O-methyl guanosine
  modified_base 10: mod_base = OTHER; note = 2'-O-methyl uridine
  modified_base 11: mod_base = OTHER; note = 2'-O-methyl guanosine
  modified_base 13: mod_base = OTHER; note = 2'-O-methyl cytidine
  modified_base 14: mod_base = OTHER; note = 2'-fluoro cytidine
  modified_base 15: mod_base = OTHER; note = 2'-O-methyl guanosine
  modified_base 16: mod_base = OTHER; note = 2'-O-methyl uridine
  modified_base 17: mod_base = OTHER; note = 2'-O-methyl uridine
  modified_base 18: mod_base = OTHER; note = 2'-O-methyl uridine
  modified_base 22: mod_base = OTHER; note = 2'-O-methyl uridine
  modified_base 25: mod_base = OTHER; note = 2'-O-methyl guanosine
  modified_base 29: mod_base = OTHER; note = 2'-O-methyl uridine
  modified_base 30: mod_base = OTHER; note = 2'-O-methyl adenosine
  modified_base 31: mod_base = OTHER; note = 2'-O-methyl guanosine
  modified_base 32: mod_base = OTHER; note = 2'-O-methyl cytidine
  modified_base 38: mod_base = OTHER; note = 2'-O-methyl uridine
  modified_base 39: mod_base = OTHER; note = 2'-O-methyl uridine phosphorothioate
  modified_base 40: mod_base = OTHER; note = 2'-O-methyl cytidine phosphorothioate
  modified_base 41: mod_base = OTHER; note = 2'-O-methyl uridine phosphorothioate
  modified_base 42: mod_base = OTHER; note = 2'-O-methyl cytidine

SEQ ID NO: 267 - DNA, 42 bp, synthetic construct; identical to SEQ ID NO: 174
  source 1..42: mol_type = other DNA
  modified_base 1: mod_base = OTHER; note = 2'-O-methyl cytidine phosphorothioate
  modified_base 2: mod_base = OTHER; note = 2'-O-methyl uridine phosphorothioate
  modified_base 3: mod_base = OTHER; note = 2'-O-methyl guanosine phosphorothioate
  modified_base 4: mod_base = OTHER; note = 2'-O-methyl adenosine
  modified_base 5: mod_base = OTHER; note = 2'-O-methyl adenosine
  modified_base 6: mod_base = OTHER; note = 2'-O-methyl cytidine
  modified_base 7: mod_base = OTHER; note = Deoxyuridine phosphorothioate
  modified_base 8: mod_base = OTHER; note = 2'-O-methyl uridine
  modified_base 9: mod_base = OTHER; note = 2'-O-methyl guanosine
  modified_base 10: mod_base = OTHER; note = 2'-O-methyl uridine
  modified_base 11: mod_base = OTHER; note = 2'-O-methyl guanosine
  modified_base 13: mod_base = OTHER; note = 2'-O-methyl cytidine
  modified_base 14: mod_base = OTHER; note = 2'-fluoro cytidine
  modified_base 15: mod_base = OTHER; note = 2'-O-methyl guanosine
  modified_base 16: mod_base = OTHER; note = 2'-fluoro uridine
  modified_base 17: mod_base = OTHER; note = 2'-O-methyl uridine
  modified_base 18: mod_base = OTHER; note = 2'-O-methyl uridine
  modified_base 22: mod_base = OTHER; note = 2'-O-methyl uridine
  modified_base 25: mod_base = OTHER; note = 2'-O-methyl guanosine
  modified_base 29: mod_base = OTHER; note = 2'-O-methyl uridine
  modified_base 30: mod_base = OTHER; note = 2'-O-methyl adenosine
  modified_base 31: mod_base = OTHER; note = 2'-O-methyl guanosine
  modified_base 32: mod_base = OTHER; note = 2'-O-methyl cytidine
  modified_base 38: mod_base = OTHER; note = 2'-O-methyl uridine
  modified_base 39: mod_base = OTHER; note = 2'-O-methyl uridine phosphorothioate
  modified_base 40: mod_base = OTHER; note = 2'-O-methyl cytidine phosphorothioate
  modified_base 41: mod_base = OTHER; note = 2'-O-methyl uridine phosphorothioate
  modified_base 42: mod_base = OTHER; note = 2'-O-methyl cytidine
  misc_feature 1..6: note = RNA
  misc_feature 7: note = DNA
  misc_feature 8..42: note = RNA

SEQ ID NO: 268 - DNA, 42 bp, synthetic construct; identical to SEQ ID NO: 174
  source 1..42: mol_type = other DNA
  modified_base 1: mod_base = OTHER; note = 2'-O-methyl cytidine phosphorothioate
  modified_base 2: mod_base = OTHER; note = 2'-O-methyl uridine phosphorothioate
  modified_base 3: mod_base = OTHER; note = 2'-O-methyl guanosine phosphorothioate
  modified_base 4: mod_base = OTHER; note = 2'-O-methyl adenosine
  modified_base 5: mod_base = OTHER; note = 2'-O-methyl adenosine
  modified_base 6: mod_base = OTHER; note = 2'-O-methyl cytidine
  modified_base 7: mod_base = OTHER; note = Deoxyuridine phosphorothioate
  modified_base 8: mod_base = OTHER; note = 2'-O-methyl uridine
  modified_base 9: mod_base = OTHER; note = 2'-O-methyl guanosine
  modified_base 10: mod_base = OTHER; note = 2'-O-methyl uridine
  modified_base 11: mod_base = OTHER; note = 2'-O-methyl guanosine
  modified_base 13: mod_base = OTHER; note = 2'-O-methyl cytidine
  modified_base 14: mod_base = OTHER; note = 2'-fluoro cytidine
  modified_base 15: mod_base = OTHER; note = 2'-O-methyl guanosine
  modified_base 16: mod_base = OTHER; note = 2'-O-methyl uridine
  modified_base 17: mod_base = OTHER; note = 2'-O-methyl uridine
  modified_base 18: mod_base = OTHER; note = 2'-O-methyl uridine
  modified_base 22: mod_base = OTHER; note = 2'-O-methyl uridine
  modified_base 25: mod_base = OTHER; note = 2'-O-methyl guanosine
  modified_base 29: mod_base = OTHER; note = 2'-O-methyl uridine
  modified_base 30: mod_base = OTHER; note = 2'-O-methyl adenosine
  modified_base 31: mod_base = OTHER; note = 2'-O-methyl guanosine
  modified_base 32: mod_base = OTHER; note = 2'-O-methyl cytidine
  modified_base 38: mod_base = OTHER; note = 2'-O-methyl uridine
  modified_base 39: mod_base = OTHER; note = 2'-O-methyl uridine phosphorothioate
  modified_base 40: mod_base = OTHER; note = 2'-O-methyl cytidine phosphorothioate
  modified_base 41: mod_base = OTHER; note = 2'-O-methyl uridine phosphorothioate
  modified_base 42: mod_base = OTHER; note = 2'-O-methyl cytidine
  misc_feature 1..6: note = RNA
  misc_feature 7: note = DNA
  misc_feature 8..42: note = RNA

SEQ ID NO: 269 - DNA, 42 bp, synthetic construct; identical to SEQ ID NO: 174
  source 1..42: mol_type = other DNA
  modified_base 1: mod_base = OTHER; note = 2'-O-methyl cytidine phosphorothioate
  modified_base 2: mod_base = OTHER; note = 2'-O-methyl uridine phosphorothioate
  modified_base 3: mod_base = OTHER; note = 2'-O-methyl guanosine phosphorothioate
  modified_base 4: mod_base = OTHER; note = 2'-O-methyl adenosine
  modified_base 5: mod_base = OTHER; note = 2'-O-methyl adenosine
  modified_base 6: mod_base = OTHER; note = 2'-fluoro cytidine
  modified_base 7: mod_base = OTHER; note = Deoxyuridine phosphorothioate
  modified_base 8: mod_base = OTHER; note = 2'-O-methyl uridine
  modified_base 9: mod_base = OTHER; note = 2'-O-methyl guanosine
  modified_base 10: mod_base = OTHER; note = 2'-O-methyl uridine
  modified_base 11: mod_base = OTHER; note = 2'-O-methyl guanosine
  modified_base 13: mod_base = OTHER; note = 2'-O-methyl cytidine
  modified_base 14: mod_base = OTHER; note = 2'-fluoro cytidine
  modified_base 15: mod_base = OTHER; note = 2'-O-methyl guanosine
  modified_base 16: mod_base = OTHER; note = 2'-fluoro uridine
  modified_base 17: mod_base = OTHER; note = 2'-O-methyl uridine
  modified_base 18: mod_base = OTHER; note = 2'-O-methyl uridine
  modified_base 22: mod_base = OTHER; note = 2'-O-methyl uridine
  modified_base 25: mod_base = OTHER; note = 2'-O-methyl guanosine
  modified_base 29: mod_base = OTHER; note = 2'-O-methyl uridine
  modified_base 30: mod_base = OTHER; note = 2'-O-methyl adenosine
  modified_base 31: mod_base = OTHER; note = 2'-O-methyl guanosine
  modified_base 32: mod_base = OTHER; note = 2'-O-methyl cytidine
  modified_base 38: mod_base = OTHER; note = 2'-O-methyl uridine
  modified_base 39: mod_base = OTHER; note = 2'-O-methyl uridine phosphorothioate
  modified_base 40: mod_base = OTHER; note = 2'-O-methyl cytidine phosphorothioate
  modified_base 41: mod_base = OTHER; note = 2'-O-methyl uridine phosphorothioate
  modified_base 42: mod_base = OTHER; note = 2'-O-methyl cytidine
  misc_feature 1..6: note = RNA
  misc_feature 7: note = DNA
  misc_feature 8..42: note = RNA

SEQ ID NO: 270 - DNA, 42 bp, synthetic construct; identical to SEQ ID NO: 174
  source 1..42: mol_type = other DNA
  modified_base 1: mod_base = OTHER; note = 2'-O-methyl cytidine phosphorothioate
  modified_base 2: mod_base = OTHER; note = 2'-O-methyl uridine phosphorothioate
  modified_base 3: mod_base = OTHER; note = 2'-O-methyl guanosine phosphorothioate
  modified_base 4: mod_base = OTHER; note = 2'-O-methyl adenosine
  modified_base 5: mod_base = OTHER; note = 2'-O-methyl adenosine
  modified_base 6: mod_base = OTHER; note = 2'-fluoro cytidine
  modified_base 7: mod_base = OTHER; note = Deoxyuridine phosphorothioate
  modified_base 8: mod_base = OTHER; note = 2'-O-methyl uridine
  modified_base 9: mod_base = OTHER; note = 2'-O-methyl guanosine
  modified_base 10: mod_base = OTHER; note = 2'-O-methyl uridine
  modified_base 11: mod_base = OTHER; note = 2'-O-methyl guanosine
  modified_base 13: mod_base = OTHER; note = 2'-O-methyl cytidine
  modified_base 14: mod_base = OTHER; note = 2'-fluoro cytidine
  modified_base 15: mod_base = OTHER; note = 2'-O-methyl guanosine
  modified_base 16: mod_base = OTHER; note = 2'-O-methyl uridine
  modified_base 17: mod_base = OTHER; note = 2'-O-methyl uridine
  modified_base 18: mod_base = OTHER; note = 2'-O-methyl uridine
  modified_base 22: mod_base = OTHER; note = 2'-O-methyl uridine
  modified_base 25: mod_base = OTHER; note = 2'-O-methyl guanosine
  modified_base 29: mod_base = OTHER; note = 2'-O-methyl uridine
  modified_base 30: mod_base = OTHER; note = 2'-O-methyl adenosine
  modified_base 31: mod_base = OTHER; note = 2'-O-methyl guanosine
  modified_base 32: mod_base = OTHER; note = 2'-O-methyl cytidine
  modified_base 38: mod_base = OTHER; note = 2'-O-methyl uridine
  modified_base 39: mod_base = OTHER; note = 2'-O-methyl uridine phosphorothioate
  modified_base 40: mod_base = OTHER; note = 2'-O-methyl cytidine phosphorothioate
  modified_base 41: mod_base = OTHER; note = 2'-O-methyl uridine phosphorothioate
  modified_base 42: mod_base = OTHER; note = 2'-O-methyl cytidine
  misc_feature 1..6: note = RNA
  misc_feature 7: note = DNA
  misc_feature 8..42: note = RNA

SEQ ID NO: 271 - DNA, 42 bp, synthetic construct; identical to SEQ ID NO: 174
  source 1..42: mol_type = other DNA
  modified_base 1: mod_base = OTHER; note = 2'-O-methyl cytidine phosphorothioate
  modified_base 2: mod_base = OTHER; note = 2'-O-methyl uridine phosphorothioate
  modified_base 3: mod_base = OTHER; note = 2'-O-methyl guanosine phosphorothioate
  modified_base 4: mod_base = OTHER; note = 2'-O-methyl adenosine
  modified_base 5: mod_base = OTHER; note = 2'-O-methyl adenosine
  modified_base 6: mod_base = OTHER; note = 2'-O-methyl cytidine
  modified_base 7: mod_base = OTHER; note = Deoxyuridine phosphorothioate
  modified_base 8: mod_base = OTHER; note = 2'-O-methyl uridine
  modified_base 9: mod_base = OTHER; note = 2'-O-methyl guanosine
  modified_base 10: mod_base = OTHER; note = 2'-O-methyl uridine
  modified_base 11: mod_base = OTHER; note = 2'-O-methyl guanosine
  modified_base 12: mod_base = OTHER; note = 2'-fluoro guanosine
  modified_base 13: mod_base = OTHER; note = 2'-O-methyl cytidine
  modified_base 18: mod_base = OTHER; note = 2'-O-methyl uridine
  modified_base 22: mod_base = OTHER; note = 2'-O-methyl uridine
  modified_base 25: mod_base = OTHER; note = 2'-O-methyl guanosine
  modified_base 29: mod_base = OTHER; note = 2'-O-methyl uridine
  modified_base 30: mod_base = OTHER; note = 2'-O-methyl adenosine
  modified_base 31: mod_base = OTHER; note = 2'-O-methyl guanosine
  modified_base 32: mod_base = OTHER; note = 2'-O-methyl cytidine
  modified_base 38: mod_base = OTHER; note = 2'-O-methyl uridine
  modified_base 39: mod_base = OTHER; note = 2'-O-methyl uridine phosphorothioate
  modified_base 40: mod_base = OTHER; note = 2'-O-methyl cytidine phosphorothioate
  modified_base 41: mod_base = OTHER; note = 2'-O-methyl uridine phosphorothioate
  modified_base 42: mod_base = OTHER; note = 2'-O-methyl cytidine
  misc_feature 1..6: note = RNA
  misc_feature 7: note = DNA
  misc_feature 8..42: note = RNA

SEQ ID NO: 272 - DNA, 42 bp, synthetic construct; identical to SEQ ID NO: 174
  source 1..42: mol_type = other DNA
  modified_base 1: mod_base = OTHER; note = 2'-O-methyl cytidine phosphorothioate
  modified_base 2: mod_base = OTHER; note = 2'-O-methyl uridine phosphorothioate
  modified_base 3: mod_base = OTHER; note = 2'-O-methyl guanosine phosphorothioate
  modified_base 4: mod_base = OTHER; note = 2'-O-methyl adenosine
  modified_base 5: mod_base = OTHER; note = 2'-O-methyl adenosine
  modified_base 6: mod_base = OTHER; note = 2'-O-methyl cytidine
  modified_base 7: mod_base = OTHER; note = Deoxyuridine phosphorothioate
  modified_base 8: mod_base = OTHER; note = 2'-O-methyl uridine
  modified_base 9: mod_base = OTHER; note = 2'-O-methyl guanosine
  modified_base 10: mod_base = OTHER; note = 2'-O-methyl uridine
  modified_base 11: mod_base = OTHER; note = 2'-O-methyl guanosine
  modified_base 12: mod_base = OTHER; note = 2'-O-methyl guanosine
  modified_base 13: mod_base = OTHER; note = 2'-O-methyl cytidine
  modified_base 18: mod_base = OTHER; note = 2'-O-methyl uridine
  modified_base 22: mod_base = OTHER; note = 2'-O-methyl uridine
  modified_base 25: mod_base = OTHER; note = 2'-O-methyl guanosine
  modified_base 29: mod_base = OTHER; note = 2'-O-methyl uridine
  modified_base 30: mod_base = OTHER; note = 2'-O-methyl adenosine
  modified_base 31: mod_base = OTHER; note = 2'-O-methyl guanosine
  modified_base 32: mod_base = OTHER; note = 2'-O-methyl cytidine
  modified_base 38: mod_base = OTHER; note = 2'-O-methyl uridine
  modified_base 39: mod_base = OTHER; note = 2'-O-methyl uridine phosphorothioate
  modified_base 40: mod_base = OTHER; note = 2'-O-methyl cytidine phosphorothioate
  modified_base 41: mod_base = OTHER; note = 2'-O-methyl uridine phosphorothioate
  modified_base 42: mod_base = OTHER; note = 2'-O-methyl cytidine
  misc_feature 1..6: note = RNA
  misc_feature 7: note = DNA
  misc_feature 8..42: note = RNA

SEQ ID NO: 273 - DNA, 42 bp, synthetic construct; identical to SEQ ID NO: 174
  source 1..42: mol_type = other DNA
  modified_base 1: mod_base = OTHER; note = 2'-O-methyl cytidine phosphorothioate
  modified_base 2: mod_base = OTHER; note = 2'-O-methyl uridine phosphorothioate
  modified_base 3: mod_base = OTHER; note = 2'-O-methyl guanosine phosphorothioate
  modified_base 4: mod_base = OTHER; note = 2'-O-methyl adenosine
  modified_base 5: mod_base = OTHER; note = 2'-O-methyl adenosine
  modified_base 6: mod_base = OTHER; note = 2'-fluoro cytidine
  modified_base 7: mod_base = OTHER; note = Deoxyuridine phosphorothioate
  modified_base 8: mod_base = OTHER; note = 2'-O-methyl uridine
  modified_base 9: mod_base = OTHER; note = 2'-O-methyl guanosine
  modified_base 10: mod_base = OTHER; note = 2'-O-methyl uridine
  modified_base 11: mod_base = OTHER; note = 2'-O-methyl guanosine
  modified_base 12: mod_base = OTHER; note = 2'-fluoro guanosine
  modified_base 13: mod_base = OTHER; note = 2'-O-methyl cytidine
  modified_base 18: mod_base = OTHER; note = 2'-O-methyl uridine
  modified_base 22: mod_base = OTHER; note = 2'-O-methyl uridine
  modified_base 25: mod_base = OTHER; note = 2'-O-methyl guanosine
  modified_base 29: mod_base = OTHER; note = 2'-O-methyl uridine
  modified_base 30: mod_base = OTHER; note = 2'-O-methyl adenosine
  modified_base 31: mod_base = OTHER; note = 2'-O-methyl guanosine
  modified_base 32: mod_base = OTHER; note = 2'-O-methyl cytidine
  modified_base 38: mod_base = OTHER; note = 2'-O-methyl uridine
  modified_base 39: mod_base = OTHER; note = 2'-O-methyl uridine phosphorothioate
  modified_base 40: mod_base = OTHER; note = 2'-O-methyl cytidine phosphorothioate
  modified_base 41: mod_base = OTHER; note = 2'-O-methyl uridine phosphorothioate
  modified_base 42: mod_base = OTHER; note = 2'-O-methyl cytidine
  misc_feature 1..6: note = RNA
  misc_feature 7: note = DNA
  misc_feature 8..42: note = RNA

SEQ ID NO: 274 - DNA, 42 bp, synthetic construct; identical to SEQ ID NO: 174
  source 1..42: mol_type = other DNA
  modified_base 1: mod_base = OTHER; note = 2'-O-methyl cytidine phosphorothioate
  modified_base 2: mod_base = OTHER; note = 2'-O-methyl uridine phosphorothioate
  modified_base 3: mod_base = OTHER; note = 2'-O-methyl guanosine phosphorothioate
  modified_base 4: mod_base = OTHER; note = 2'-O-methyl adenosine
  modified_base 5: mod_base = OTHER; note = 2'-O-methyl adenosine
  modified_base 6: mod_base = OTHER; note = 2'-fluoro cytidine
  modified_base 7: mod_base = OTHER; note = Deoxyuridine phosphorothioate
  modified_base 8: mod_base = OTHER; note = 2'-O-methyl uridine
  modified_base 9: mod_base = OTHER; note = 2'-O-methyl guanosine
  modified_base 10: mod_base = OTHER; note = 2'-O-methyl uridine
  modified_base 11: mod_base = OTHER; note = 2'-O-methyl guanosine
  modified_base 12: mod_base = OTHER; note = 2'-O-methyl guanosine
  modified_base 13: mod_base = OTHER; note = 2'-O-methyl cytidine
  modified_base 18: mod_base = OTHER; note = 2'-O-methyl uridine
  modified_base 22: mod_base = OTHER; note = 2'-O-methyl uridine
  modified_base 25: mod_base = OTHER; note = 2'-O-methyl guanosine
  modified_base 29: mod_base = OTHER; note = 2'-O-methyl uridine
  modified_base 30: mod_base = OTHER; note = 2'-O-methyl adenosine
  modified_base 31: mod_base = OTHER; note = 2'-O-methyl guanosine
  modified_base 32: mod_base = OTHER; note = 2'-O-methyl cytidine
  modified_base 38: mod_base = OTHER; note = 2'-O-methyl uridine
  modified_base 39: mod_base = OTHER; note = 2'-O-methyl uridine phosphorothioate
  modified_base 40: mod_base = OTHER; note = 2'-O-methyl cytidine phosphorothioate
  modified_base 41: mod_base = OTHER; note = 2'-O-methyl uridine phosphorothioate
  modified_base 42: mod_base = OTHER; note = 2'-O-methyl cytidine
  misc_feature 1..6: note = RNA
  misc_feature 7: note = DNA
  misc_feature 8..42: note = RNA

SEQ ID NO: 275 - RNA, 42 nt, synthetic construct; identical to SEQ ID NO: 126
  source 1..42: mol_type = other RNA
  modified_base 1: mod_base = OTHER; note = 2'-O-methyl cytidine phosphorothioate
  modified_base 2: mod_base = OTHER; note = 2'-O-methyl uridine phosphorothioate
  modified_base 3: mod_base = OTHER; note = 2'-O-methyl guanosine phosphorothioate
  modified_base 4: mod_base = OTHER; note = 2'-O-methyl adenosine
  modified_base 5: mod_base = OTHER; note = 2'-O-methyl adenosine
  modified_base 9: mod_base = OTHER; note = 2'-O-methyl guanosine
  modified_base 10: mod_base = OTHER; note = 2'-O-methyl uridine
  modified_base 11: mod_base = OTHER; note = 2'-O-methyl guanosine
  modified_base 12: mod_base = OTHER; note = 2'-fluoro guanosine
  modified_base 13: mod_base = OTHER; note = 2'-O-methyl cytidine
  modified_base 14: mod_base = OTHER; note = 2'-fluoro cytidine
  modified_base 15: mod_base = OTHER; note = 2'-O-methyl guanosine
  modified_base 16: mod_base = OTHER; note = 2'-fluoro uridine
  modified_base 17: mod_base = OTHER; note = 2'-O-methyl uridine
  modified_base 18: mod_base = OTHER; note = 2'-O-methyl uridine
  modified_base 22: mod_base = OTHER; note = 2'-O-methyl uridine
  modified_base 25: mod_base = OTHER; note = 2'-O-methyl guanosine
  modified_base 29: mod_base = OTHER; note = 2'-O-methyl uridine
  modified_base 30: mod_base = OTHER; note = 2'-O-methyl adenosine
  modified_base 31: mod_base = OTHER; note = 2'-O-methyl guanosine
  modified_base 32: mod_base = OTHER; note = 2'-O-methyl cytidine
  modified_base 38: mod_base = OTHER; note = 2'-O-methyl uridine
  modified_base 39: mod_base = OTHER; note = 2'-O-methyl uridine phosphorothioate
  modified_base 40: mod_base = OTHER; note = 2'-O-methyl cytidine phosphorothioate
  modified_base 41: mod_base = OTHER; note = 2'-O-methyl uridine phosphorothioate
  modified_base 42: mod_base = OTHER; note = 2'-O-methyl cytidine

SEQ ID NO: 276 - RNA, 42 nt, synthetic construct; identical to SEQ ID NO: 126
  source 1..42: mol_type = other RNA
  modified_base 1: mod_base = OTHER; note = 2'-O-methyl cytidine phosphorothioate
  modified_base 2: mod_base = OTHER; note = 2'-O-methyl uridine phosphorothioate
  modified_base 3: mod_base = OTHER; note = 2'-O-methyl guanosine phosphorothioate
  modified_base 4: mod_base = OTHER; note = 2'-O-methyl adenosine
  modified_base 5: mod_base = OTHER; note = 2'-O-methyl adenosine
  modified_base 9: mod_base = OTHER; note = 2'-O-methyl guanosine
  modified_base 10: mod_base = OTHER; note = 2'-O-methyl uridine
  modified_base 11: mod_base = OTHER; note = 2'-O-methyl guanosine
  modified_base 12: mod_base = OTHER; note = 2'-O-methyl guanosine
  modified_base 13: mod_base = OTHER; note = 2'-O-methyl cytidine
  modified_base 14: mod_base = OTHER; note = 2'-fluoro cytidine
  modified_base 15: mod_base = OTHER; note = 2'-O-methyl guanosine
  modified_base 16: mod_base = OTHER; note = 2'-fluoro uridine
  modified_base 17: mod_base = OTHER; note = 2'-O-methyl uridine
  modified_base 18: mod_base = OTHER; note = 2'-O-methyl uridine
  modified_base 22: mod_base = OTHER; note = 2'-O-methyl uridine
  modified_base 25: mod_base = OTHER; note = 2'-O-methyl guanosine
  modified_base 29: mod_base = OTHER; note = 2'-O-methyl uridine
  modified_base 30: mod_base = OTHER; note = 2'-O-methyl adenosine
  modified_base 31: mod_base = OTHER; note = 2'-O-methyl guanosine
  modified_base 32: mod_base = OTHER; note = 2'-O-methyl cytidine
  modified_base 38: mod_base = OTHER; note = 2'-O-methyl uridine
  modified_base 39: mod_base = OTHER; note = 2'-O-methyl uridine phosphorothioate
  modified_base 40: mod_base = OTHER; note = 2'-O-methyl cytidine phosphorothioate
  modified_base 41: mod_base = OTHER; note = 2'-O-methyl uridine phosphorothioate
  modified_base 42: mod_base = OTHER; note = 2'-O-methyl cytidine

SEQ ID NO: 277 - RNA, 42 nt, synthetic construct; identical to SEQ ID NO: 126
  source 1..42: mol_type = other RNA
  modified_base 1: mod_base = OTHER; note = 2'-O-methyl cytidine phosphorothioate
  modified_base 2: mod_base = OTHER; note = 2'-O-methyl uridine phosphorothioate
  modified_base 3: mod_base = OTHER; note = 2'-O-methyl guanosine phosphorothioate
  modified_base 4: mod_base = OTHER; note = 2'-O-methyl adenosine
  modified_base 5: mod_base = OTHER; note = 2'-O-methyl adenosine
  modified_base 9: mod_base = OTHER; note = 2'-O-methyl guanosine
  modified_base 10: mod_base = OTHER; note = 2'-O-methyl uridine
  modified_base 11: mod_base = OTHER; note = 2'-O-methyl guanosine
  modified_base 12: mod_base = OTHER; note = 2'-fluoro guanosine
  modified_base 13: mod_base = OTHER; note = 2'-O-methyl cytidine
  modified_base 14: mod_base = OTHER; note = 2'-fluoro cytidine
  modified_base 15: mod_base = OTHER; note = 2'-O-methyl guanosine
  modified_base 16: mod_base = OTHER; note = 2'-O-methyl uridine
  modified_base 17: mod_base = OTHER; note = 2'-O-methyl uridine
  modified_base 18: mod_base = OTHER; note = 2'-O-methyl uridine
  modified_base 22: mod_base = OTHER; note = 2'-O-methyl uridine
  modified_base 25: mod_base = OTHER; note = 2'-O-methyl guanosine
  modified_base 29: mod_base = OTHER; note = 2'-O-methyl uridine
  modified_base 30: mod_base = OTHER; note = 2'-O-methyl adenosine
  modified_base 31: mod_base = OTHER; note = 2'-O-methyl guanosine
  modified_base 32: mod_base = OTHER; note = 2'-O-methyl cytidine
  modified_base 38: mod_base = OTHER; note = 2'-O-methyl uridine
  modified_base 39: mod_base = OTHER; note = 2'-O-methyl uridine phosphorothioate
  modified_base 40: mod_base = OTHER; note = 2'-O-methyl cytidine phosphorothioate
  modified_base 41: mod_base = OTHER; note = 2'-O-methyl uridine phosphorothioate
  modified_base 42: mod_base = OTHER; note = 2'-O-methyl cytidine

SEQ ID NO: 278 - RNA, 42 nt, synthetic construct; identical to SEQ ID NO: 126
  source 1..42: mol_type = other RNA
  modified_base 1: mod_base = OTHER; note = 2'-O-methyl cytidine phosphorothioate
  modified_base 2: mod_base = OTHER; note = 2'-O-methyl uridine phosphorothioate
  modified_base 3: mod_base = OTHER; note = 2'-O-methyl guanosine phosphorothioate
  modified_base 4: mod_base = OTHER; note = 2'-O-methyl adenosine
  modified_base 5: mod_base = OTHER; note = 2'-O-methyl adenosine
  modified_base 9: mod_base = OTHER; note = 2'-O-methyl guanosine
  modified_base 10: mod_base = OTHER; note = 2'-O-methyl uridine
  modified_base 11: mod_base = OTHER; note = 2'-O-methyl guanosine
  modified_base 12: mod_base = OTHER; note = 2'-O-methyl guanosine
  modified_base 13: mod_base = OTHER; note = 2'-O-methyl cytidine
  modified_base 14: mod_base = OTHER; note = 2'-fluoro cytidine
  modified_base 15: mod_base = OTHER; note = 2'-O-methyl guanosine
  modified_base 16: mod_base = OTHER; note = 2'-O-methyl uridine
  modified_base 17: mod_base = OTHER; note = 2'-O-methyl uridine
  modified_base 18: mod_base = OTHER; note = 2'-O-methyl uridine
  modified_base 22: mod_base = OTHER; note = 2'-O-methyl uridine
  modified_base 25: mod_base = OTHER; note = 2'-O-methyl guanosine
  modified_base 29: mod_base = OTHER; note = 2'-O-methyl uridine
  modified_base 30: mod_base = OTHER; note = 2'-O-methyl adenosine
  modified_base 31: mod_base = OTHER; note = 2'-O-methyl guanosine
  modified_base 32: mod_base = OTHER; note = 2'-O-methyl cytidine
  modified_base 38: mod_base = OTHER; note = 2'-O-methyl uridine
  modified_base 39: mod_base = OTHER; note = 2'-O-methyl uridine phosphorothioate
  modified_base 40: mod_base = OTHER; note = 2'-O-methyl cytidine phosphorothioate
  modified_base 41: mod_base = OTHER; note = 2'-O-methyl uridine phosphorothioate
  modified_base 42: mod_base = OTHER; note = 2'-O-methyl cytidine

SEQ ID NO: 279 - DNA, 42 bp, synthetic construct; identical to SEQ ID NO: 174
  source 1..42: mol_type = other DNA
  modified_base 1: mod_base = OTHER; note = 2'-O-methyl cytidine phosphorothioate
  modified_base 2: mod_base = OTHER; note = 2'-O-methyl uridine phosphorothioate
  modified_base 3: mod_base = OTHER; note = 2'-O-methyl guanosine phosphorothioate
  modified_base 4: mod_base = OTHER; note = 2'-O-methyl adenosine
  modified_base 5: mod_base = OTHER; note = 2'-O-methyl adenosine
  modified_base 6: mod_base = OTHER; note = 2'-O-methyl cytidine
  modified_base 7: mod_base = OTHER; note = Deoxyuridine phosphorothioate
  modified_base 8: mod_base = OTHER; note = 2'-O-methyl uridine
  modified_base 9: mod_base = OTHER; note = 2'-O-methyl guanosine
  modified_base 10: mod_base = OTHER; note = 2'-O-methyl uridine
  modified_base 11: mod_base = OTHER; note = 2'-O-methyl guanosine
  modified_base 12: mod_base = OTHER; note = 2'-fluoro guanosine
  modified_base 13: mod_base = OTHER; note = 2'-O-methyl cytidine
  modified_base 14: mod_base = OTHER; note = 2'-fluoro cytidine
  modified_base 15: mod_base = OTHER; note = 2'-O-methyl guanosine
  modified_base 16: mod_base = OTHER; note = 2'-fluoro uridine
  modified_base 17: mod_base = OTHER; note = 2'-O-methyl uridine
  modified_base 18: mod_base = OTHER; note = 2'-O-methyl uridine
  modified_base 22: mod_base = OTHER; note = 2'-O-methyl uridine
  modified_base 25: mod_base = OTHER; note = 2'-O-methyl guanosine
  modified_base 29: mod_base = OTHER; note = 2'-O-methyl uridine
  modified_base 30: mod_base = OTHER; note = 2'-O-methyl adenosine
  modified_base 31: mod_base = OTHER; note = 2'-O-methyl guanosine
  modified_base 32: mod_base = OTHER; note = 2'-O-methyl cytidine
  modified_base 38: mod_base = OTHER; note = 2'-O-methyl uridine
  modified_base 39: mod_base = OTHER; note = 2'-O-methyl uridine phosphorothioate
  modified_base 40: mod_base = OTHER; note = 2'-O-methyl cytidine phosphorothioate
  modified_base 41: mod_base = OTHER; note = 2'-O-methyl uridine phosphorothioate
  modified_base 42: mod_base = OTHER; note = 2'-O-methyl cytidine
  misc_feature 1..6: note = RNA
  misc_feature 7: note = DNA
  misc_feature 8..42: note = RNA

SEQ ID NO: 280 - DNA, 42 bp, synthetic construct; identical to SEQ ID NO: 174
  source 1..42: mol_type = other DNA
  modified_base 1: mod_base = OTHER; note = 2'-O-methyl cytidine phosphorothioate
  modified_base 2: mod_base = OTHER; note = 2'-O-methyl uridine phosphorothioate
  modified_base 3: mod_base = OTHER; note = 2'-O-methyl guanosine phosphorothioate
  modified_base 4: mod_base = OTHER; note = 2'-O-methyl adenosine
  modified_base 5: mod_base = OTHER; note = 2'-O-methyl adenosine
  modified_base 6: mod_base = OTHER; note = 2'-O-methyl cytidine
  modified_base 7: mod_base = OTHER; note = Deoxyuridine phosphorothioate
  modified_base 8: mod_base = OTHER; note = 2'-O-methyl uridine
  modified_base 9: mod_base = OTHER; note = 2'-O-methyl guanosine
  modified_base 10: mod_base = OTHER; note = 2'-O-methyl uridine
  modified_base 11: mod_base = OTHER; note = 2'-O-methyl guanosine
  modified_base 12: mod_base = OTHER; note = 2'-O-methyl guanosine
  modified_base 13: mod_base = OTHER; note = 2'-O-methyl cytidine
  modified_base 14: mod_base = OTHER; note = 2'-fluoro cytidine
  modified_base 15: mod_base = OTHER; note = 2'-O-methyl guanosine
  modified_base 16: mod_base = OTHER; note = 2'-fluoro uridine
  modified_base 17: mod_base = OTHER; note = 2'-O-methyl uridine
  modified_base 18: mod_base = OTHER; note = 2'-O-methyl uridine
  modified_base 22: mod_base = OTHER; note = 2'-O-methyl uridine
  modified_base 25: mod_base = OTHER; note = 2'-O-methyl guanosine
  modified_base 29: mod_base = OTHER; note = 2'-O-methyl uridine
  modified_base 30: mod_base = OTHER; note = 2'-O-methyl adenosine
  modified_base 31: mod_base = OTHER; note = 2'-O-methyl guanosine
  modified_base 32: mod_base = OTHER; note = 2'-O-methyl cytidine
  modified_base 38: mod_base = OTHER; note = 2'-O-methyl uridine
  modified_base 39: mod_base = OTHER; note = 2'-O-methyl uridine phosphorothioate
  modified_base 40: mod_base = OTHER; note = 2'-O-methyl cytidine phosphorothioate
  modified_base 41: mod_base = OTHER; note = 2'-O-methyl uridine phosphorothioate
  modified_base 42: mod_base = OTHER; note = 2'-O-methyl cytidine
  misc_feature 1..6: note = RNA
  misc_feature 7: note = DNA
  misc_feature 8..42: note = RNA

SEQ ID NO: 281 - DNA, 42 bp, synthetic construct; identical to SEQ ID NO: 174
  source 1..42: mol_type = other DNA
  modified_base 1: mod_base = OTHER; note = 2'-O-methyl cytidine phosphorothioate
  modified_base 2: mod_base = OTHER; note = 2'-O-methyl uridine phosphorothioate
  modified_base 3: mod_base = OTHER; note = 2'-O-methyl guanosine phosphorothioate
  modified_base 4: mod_base = OTHER; note = 2'-O-methyl adenosine
  modified_base 5: mod_base = OTHER; note = 2'-O-methyl adenosine
  modified_base 6: mod_base = OTHER; note = 2'-fluoro cytidine
  modified_base 7: mod_base = OTHER; note = Deoxyuridine phosphorothioate
  modified_base 8: mod_base = OTHER; note = 2'-O-methyl uridine
  modified_base 9: mod_base = OTHER; note = 2'-O-methyl guanosine
  modified_base 10: mod_base = OTHER; note = 2'-O-methyl uridine
  modified_base 11: mod_base = OTHER; note = 2'-O-methyl guanosine
  modified_base 12: mod_base = OTHER; note = 2'-fluoro guanosine
  modified_base 13: mod_base = OTHER; note = 2'-O-methyl cytidine
  modified_base 14: mod_base = OTHER; note = 2'-fluoro cytidine
  modified_base 15: mod_base = OTHER; note = 2'-O-methyl guanosine
  modified_base 16: mod_base = OTHER; note = 2'-fluoro uridine
  modified_base 17: mod_base = OTHER; note = 2'-O-methyl uridine
  modified_base 18: mod_base = OTHER; note = 2'-O-methyl uridine
  modified_base 22: mod_base = OTHER; note = 2'-O-methyl uridine
  modified_base 25: mod_base = OTHER; note = 2'-O-methyl guanosine
  modified_base 29: mod_base = OTHER; note = 2'-O-methyl uridine
  modified_base 30: mod_base = OTHER; note = 2'-O-methyl adenosine
  modified_base 31: mod_base = OTHER; note = 2'-O-methyl guanosine
  modified_base 32: mod_base = OTHER; note = 2'-O-methyl cytidine
  modified_base 38: mod_base = OTHER; note = 2'-O-methyl uridine
  modified_base 39: mod_base = OTHER; note = 2'-O-methyl uridine phosphorothioate
  modified_base 40: mod_base = OTHER; note = 2'-O-methyl cytidine phosphorothioate
  modified_base 41: mod_base = OTHER; note = 2'-O-methyl uridine phosphorothioate
  modified_base 42: mod_base = OTHER; note = 2'-O-methyl cytidine
  misc_feature 1..6: note = RNA
  misc_feature 7: note = DNA
  misc_feature 8..42: note = RNA

SEQ ID NO: 282 - DNA, 42 bp, synthetic construct; identical to SEQ ID NO: 174
  source 1..42: mol_type = other DNA
  modified_base 1: mod_base = OTHER; note = 2'-O-methyl cytidine phosphorothioate
  modified_base 2: mod_base = OTHER; note = 2'-O-methyl uridine phosphorothioate
  modified_base 3: mod_base = OTHER; note = 2'-O-methyl guanosine phosphorothioate
  modified_base 4: mod_base = OTHER; note = 2'-O-methyl adenosine
  modified_base 5: mod_base = OTHER; note = 2'-O-methyl adenosine
  modified_base 6: mod_base = OTHER; note = 2'-fluoro cytidine
  modified_base 7: mod_base = OTHER; note = Deoxyuridine phosphorothioate
  modified_base 8: mod_base = OTHER; note = 2'-O-methyl uridine
  modified_base 9: mod_base = OTHER; note = 2'-O-methyl guanosine
  modified_base 10: mod_base = OTHER; note = 2'-O-methyl uridine
  modified_base 11: mod_base = OTHER; note = 2'-O-methyl guanosine
  modified_base 12: mod_base = OTHER; note = 2'-O-methyl guanosine
  modified_base 13: mod_base = OTHER; note = 2'-O-methyl cytidine
  modified_base 14: mod_base = OTHER; note = 2'-fluoro cytidine
  modified_base 15: mod_base = OTHER; note = 2'-O-methyl guanosine
  modified_base 16: mod_base = OTHER; note = 2'-fluoro uridine
  modified_base 17: mod_base = OTHER; note = 2'-O-methyl uridine
  modified_base 18: mod_base = OTHER; note = 2'-O-methyl uridine
  modified_base 22: mod_base = OTHER; note = 2'-O-methyl uridine
  modified_base 25: mod_base = OTHER; note = 2'-O-methyl guanosine
  modified_base 29: mod_base = OTHER; note = 2'-O-methyl uridine
  modified_base 30: mod_base = OTHER; note = 2'-O-methyl adenosine
  modified_base 31: mod_base = OTHER; note = 2'-O-methyl guanosine
  modified_base 32: mod_base = OTHER; note = 2'-O-methyl cytidine
  modified_base 38: mod_base = OTHER; note = 2'-O-methyl uridine
  modified_base 39: mod_base = OTHER; note = 2'-O-methyl uridine phosphorothioate
  modified_base 40: mod_base = OTHER; note = 2'-O-methyl cytidine phosphorothioate
  modified_base 41: mod_base = OTHER; note = 2'-O-methyl uridine phosphorothioate
  modified_base 42: mod_base = OTHER; note = 2'-O-methyl cytidine
  misc_feature 1..6: note = RNA
  misc_feature 7: note = DNA
  misc_feature 8..42: note = RNA

SEQ ID NO: 283 - DNA, 42 bp, synthetic construct; identical to SEQ ID NO: 174
  source 1..42: mol_type = other DNA
  modified_base 1: mod_base = OTHER; note = 2'-O-methyl cytidine phosphorothioate
  modified_base 2: mod_base = OTHER; note = 2'-O-methyl uridine phosphorothioate
  modified_base 3: mod_base = OTHER; note = 2'-O-methyl guanosine phosphorothioate
  modified_base 4: mod_base = OTHER; note = 2'-O-methyl adenosine
  modified_base 5: mod_base = OTHER; note = 2'-O-methyl adenosine
  modified_base 6: mod_base = OTHER; note = 2'-O-methyl cytidine
  modified_base 7: mod_base = OTHER; note = Deoxyuridine phosphorothioate
  modified_base 8: mod_base = OTHER; note = 2'-O-methyl uridine
  modified_base 9: mod_base = OTHER; note = 2'-O-methyl guanosine
  modified_base 10: mod_base = OTHER; note = 2'-O-methyl uridine
  modified_base 11: mod_base = OTHER; note = 2'-O-methyl guanosine
  modified_base 12: mod_base = OTHER; note = 2'-fluoro guanosine
  modified_base 13: mod_base = OTHER; note = 2'-O-methyl cytidine
  modified_base 14: mod_base = OTHER; note = 2'-fluoro cytidine
  modified_base 15: mod_base = OTHER; note = 2'-O-methyl guanosine
  modified_base 16: mod_base = OTHER; note = 2'-O-methyl uridine
  modified_base 17: mod_base = OTHER; note = 2'-O-methyl uridine
  modified_base 18: mod_base = OTHER; note = 2'-O-methyl uridine
  modified_base 22: mod_base = OTHER; note = 2'-O-methyl uridine
  modified_base 25: mod_base = OTHER; note = 2'-O-methyl guanosine
  modified_base 29: mod_base = OTHER; note = 2'-O-methyl uridine
  modified_base 30: mod_base = OTHER; note = 2'-O-methyl adenosine
  modified_base 31: mod_base = OTHER; note = 2'-O-methyl guanosine
  modified_base 32: mod_base = OTHER; note = 2'-O-methyl cytidine
  modified_base 38: mod_base = OTHER; note = 2'-O-methyl uridine
  modified_base 39: mod_base = OTHER; note = 2'-O-methyl uridine phosphorothioate
  modified_base 40: mod_base = OTHER; note = 2'-O-methyl cytidine phosphorothioate
  modified_base 41: mod_base = OTHER; note = 2'-O-methyl uridine phosphorothioate
  modified_base 42: mod_base = OTHER; note = 2'-O-methyl cytidine
  misc_feature 1..6: note = RNA
  misc_feature 7: note = DNA
  misc_feature 8..42: note = RNA

SEQ ID NO: 284 - DNA, 42 bp, synthetic construct; identical to SEQ ID NO: 174
  source 1..42: mol_type = other DNA
  modified_base 1: mod_base = OTHER; note = 2'-O-methyl cytidine phosphorothioate
  modified_base 2: mod_base = OTHER; note = 2'-O-methyl uridine phosphorothioate
  modified_base 3: mod_base = OTHER; note = 2'-O-methyl guanosine phosphorothioate
  modified_base 4: mod_base = OTHER; note = 2'-O-methyl adenosine
  modified_base 5: mod_base = OTHER; note = 2'-O-methyl adenosine
  modified_base 6: mod_base = OTHER; note = 2'-O-methyl cytidine
  modified_base 7: mod_base = OTHER; note = Deoxyuridine phosphorothioate
  modified_base 8: mod_base = OTHER; note = 2'-O-methyl uridine
  modified_base 9: mod_base = OTHER; note = 2'-O-methyl guanosine
  modified_base 10: mod_base = OTHER; note = 2'-O-methyl uridine
  modified_base 11: mod_base = OTHER; note = 2'-O-methyl guanosine
  modified_base 12: mod_base = OTHER; note = 2'-O-methyl guanosine
  modified_base 13: mod_base = OTHER; note = 2'-O-methyl cytidine
  modified_base 14: mod_base = OTHER; note = 2'-fluoro cytidine
  modified_base 15: mod_base = OTHER; note = 2'-O-methyl guanosine
  modified_base 16: mod_base = OTHER; note = 2'-O-methyl uridine
  modified_base 17: mod_base = OTHER; note = 2'-O-methyl uridine
  modified_base 18: mod_base = OTHER; note = 2'-O-methyl uridine
  modified_base 22: mod_base = OTHER; note = 2'-O-methyl uridine
  modified_base 25: mod_base = OTHER; note = 2'-O-methyl guanosine
  modified_base 29: mod_base = OTHER; note = 2'-O-methyl uridine
  modified_base 30: mod_base = OTHER; note = 2'-O-methyl adenosine
  modified_base 31: mod_base = OTHER; note = 2'-O-methyl guanosine
  modified_base 32: mod_base = OTHER; note = 2'-O-methyl cytidine
  modified_base 38: mod_base = OTHER; note = 2'-O-methyl uridine
  modified_base 39: mod_base = OTHER; note = 2'-O-methyl uridine phosphorothioate
  modified_base 40: mod_base = OTHER; note = 2'-O-methyl cytidine phosphorothioate
  modified_base 41: mod_base = OTHER; note = 2'-O-methyl uridine phosphorothioate
  modified_base 42: mod_base = OTHER; note = 2'-O-methyl cytidine
  misc_feature 1..6: note = RNA
  misc_feature 7: note = DNA
  misc_feature 8..42: note = RNA

SEQ ID NO: 285 - DNA, 42 bp, synthetic construct; identical to SEQ ID NO: 174
  source 1..42: mol_type = other DNA
  modified_base 1: mod_base = OTHER; note = 2'-O-methyl cytidine phosphorothioate
  modified_base 2: mod_base = OTHER; note = 2'-O-methyl uridine phosphorothioate
  modified_base 3: mod_base = OTHER; note = 2'-O-methyl guanosine phosphorothioate
  modified_base 4: mod_base = OTHER; note = 2'-O-methyl adenosine
  modified_base 5: mod_base = OTHER; note = 2'-O-methyl adenosine
  modified_base 6: mod_base = OTHER; note = 2'-fluoro cytidine
  modified_base 7: mod_base = OTHER; note = Deoxyuridine phosphorothioate
  modified_base 8: mod_base = OTHER; note = 2'-O-methyl uridine
  modified_base 9: mod_base = OTHER; note = 2'-O-methyl guanosine
  modified_base 10: mod_base = OTHER; note = 2'-O-methyl uridine
  modified_base 11: mod_base = OTHER; note = 2'-O-methyl guanosine
  modified_base 12: mod_base = OTHER; note = 2'-fluoro guanosine
  modified_base 13: mod_base = OTHER; note = 2'-O-methyl cytidine
  modified_base 14: mod_base = OTHER; note = 2'-fluoro cytidine
  modified_base 15: mod_base = OTHER; note = 2'-O-methyl guanosine
  modified_base 16: mod_base = OTHER; note = 2'-O-methyl uridine
  modified_base 17: mod_base = OTHER; note = 2'-O-methyl uridine
  modified_base 18: mod_base = OTHER; note = 2'-O-methyl uridine
  modified_base 22: mod_base = OTHER; note = 2'-O-methyl uridine
  modified_base 25: mod_base = OTHER; note = 2'-O-methyl guanosine
  modified_base 29: mod_base = OTHER; note = 2'-O-methyl uridine
  modified_base 30: mod_base = OTHER; note = 2'-O-methyl adenosine
  modified_base 31: mod_base = OTHER; note = 2'-O-methyl guanosine
  modified_base 32: mod_base = OTHER; note = 2'-O-methyl cytidine
  modified_base 38: mod_base = OTHER; note = 2'-O-methyl uridine
  modified_base 39: mod_base = OTHER; note = 2'-O-methyl uridine phosphorothioate
  modified_base 40: mod_base = OTHER; note = 2'-O-methyl cytidine phosphorothioate
  modified_base 41: mod_base = OTHER; note = 2'-O-methyl uridine phosphorothioate
  modified_base 42: mod_base = OTHER; note = 2'-O-methyl cytidine
  misc_feature 1..6: note = RNA
  misc_feature 7: note = DNA
  misc_feature 8..42: note = RNA

SEQ ID NO: 286 - DNA, 42 bp, synthetic construct; identical to SEQ ID NO: 174
  source 1..42: mol_type = other DNA
  modified_base 1: mod_base = OTHER; note = 2'-O-methyl cytidine phosphorothioate
  modified_base 2: mod_base = OTHER; note = 2'-O-methyl uridine phosphorothioate
  modified_base 3: mod_base = OTHER; note = 2'-O-methyl guanosine phosphorothioate
  modified_base 4: mod_base = OTHER; note = 2'-O-methyl adenosine
  modified_base 5: mod_base = OTHER; note = 2'-O-methyl adenosine
  modified_base 6: mod_base = OTHER; note = 2'-fluoro cytidine
  modified_base 7: mod_base = OTHER; note = Deoxyuridine phosphorothioate
  modified_base 8: mod_base = OTHER; note = 2'-O-methyl uridine
  modified_base 9: mod_base = OTHER; note = 2'-O-methyl guanosine
  modified_base 10: mod_base = OTHER; note = 2'-O-methyl uridine
  modified_base 11: mod_base = OTHER; note = 2'-O-methyl guanosine
  modified_base 12: mod_base = OTHER; note = 2'-O-methyl guanosine
  modified_base 13: mod_base = OTHER; note = 2'-O-methyl cytidine
  modified_base 14: mod_base = OTHER; note = 2'-fluoro cytidine
  modified_base 15: mod_base = OTHER; note = 2'-O-methyl guanosine
  modified_base 16: mod_base = OTHER; note = 2'-O-methyl uridine
  modified_base 17: mod_base = OTHER; note = 2'-O-methyl uridine
  modified_base 18: mod_base = OTHER; note = 2'-O-methyl uridine
  modified_base 22: mod_base = OTHER; note = 2'-O-methyl uridine
  modified_base 25: mod_base = OTHER; note = 2'-O-methyl guanosine
  modified_base 29: mod_base = OTHER; note = 2'-O-methyl uridine
  modified_base 30: mod_base = OTHER; note = 2'-O-methyl adenosine
  modified_base 31: mod_base = OTHER; note = 2'-O-methyl guanosine
  modified_base 32: mod_base = OTHER; note = 2'-O-methyl cytidine
  modified_base 38: mod_base = OTHER; note = 2'-O-methyl uridine
  modified_base 39: mod_base = OTHER; note = 2'-O-methyl uridine phosphorothioate
  modified_base 40: mod_base = OTHER; note = 2'-O-methyl cytidine phosphorothioate
  modified_base 41: mod_base = OTHER; note = 2'-O-methyl uridine phosphorothioate
  modified_base 42: mod_base = OTHER; note = 2'-O-methyl cytidine
  misc_feature 1..6: note = RNA
  misc_feature 7: note = DNA
  misc_feature 8..42: note = RNA

SEQ ID NO: 287 - RNA, 42 nt, synthetic construct; identical to SEQ ID NO: 126
  source 1..42: mol_type = other RNA
  modified_base 1: mod_base = OTHER; note = 2'-O-methyl cytidine phosphorothioate
  modified_base 2: mod_base = OTHER; note = 2'-O-methyl uridine phosphorothioate
  modified_base 3: mod_base = OTHER; note = 2'-O-methyl guanosine phosphorothioate
  modified_base 4: mod_base = OTHER; note = 2'-O-methyl adenosine
  modified_base 5: mod_base = OTHER; note = 2'-O-methyl adenosine
  modified_base 9: mod_base = OTHER; note = 2'-O-methyl guanosine
  modified_base 10: mod_base = OTHER; note = 2'-O-methyl uridine
  modified_base 11: mod_base = OTHER; note = 2'-O-methyl guanosine
  modified_base 13: mod_base = OTHER; note = 2'-O-methyl cytidine
  modified_base 18: mod_base = OTHER; note = 2'-O-methyl uridine
  modified_base 20: mod_base = OTHER; note = 2'-fluoro cytidine
  modified_base 21: mod_base = OTHER; note = 2'-O-methyl guanosine
  modified_base 22: mod_base = OTHER; note = 2'-O-methyl uridine
  modified_base 25: mod_base = OTHER; note = 2'-O-methyl guanosine
  modified_base 29: mod_base = OTHER; note = 2'-O-methyl uridine
  modified_base 30: mod_base = OTHER; note = 2'-O-methyl adenosine
  modified_base 31: mod_base = OTHER; note = 2'-O-methyl guanosine
  modified_base 32: mod_base = OTHER; note = 2'-O-methyl cytidine
  modified_base 38: mod_base = OTHER; note = 2'-O-methyl uridine
  modified_base 39: mod_base = OTHER; note = 2'-O-methyl uridine phosphorothioate
  modified_base 40: mod_base = OTHER; note = 2'-O-methyl cytidine phosphorothioate
  modified_base 41: mod_base = OTHER; note = 2'-O-methyl uridine phosphorothioate
  modified_base 42: mod_base = OTHER; note = 2'-O-methyl cytidine

SEQ ID NO: 288 - RNA, 42 nt, synthetic construct; identical to SEQ ID NO: 126
  source 1..42: mol_type = other RNA
  modified_base 1: mod_base = OTHER; note = 2'-O-methyl cytidine phosphorothioate
  modified_base 2: mod_base = OTHER; note = 2'-O-methyl uridine phosphorothioate
  modified_base 3: mod_base = OTHER; note = 2'-O-methyl guanosine phosphorothioate
  modified_base 4: mod_base = OTHER; note = 2'-O-methyl adenosine
  modified_base 5: mod_base = OTHER; note = 2'-O-methyl adenosine
  modified_base 9: mod_base = OTHER; note = 2'-O-methyl guanosine
  modified_base 10: mod_base = OTHER; note = 2'-O-methyl uridine
  modified_base 11: mod_base = OTHER; note = 2'-O-methyl guanosine
  modified_base 13: mod_base = OTHER; note = 2'-O-methyl cytidine
  modified_base 18: mod_base = OTHER; note = 2'-O-methyl uridine
  modified_base 20: mod_base = OTHER; note = 2'-fluoro cytidine
  modified_base 21: mod_base = OTHER; note = 2'-fluoro guanosine
  modified_base 22: mod_base = OTHER; note = 2'-O-methyl uridine
  modified_base 25: mod_base = OTHER; note = 2'-O-methyl guanosine
  modified_base 29: mod_base = OTHER; note = 2'-O-methyl uridine
  modified_base 30: mod_base = OTHER; note = 2'-O-methyl adenosine
  modified_base 31: mod_base = OTHER; note = 2'-O-methyl guanosine
  modified_base 32: mod_base = OTHER; note = 2'-O-methyl cytidine
  modified_base 38: mod_base = OTHER; note = 2'-O-methyl uridine
  modified_base 39: mod_base = OTHER; note = 2'-O-methyl uridine phosphorothioate
  modified_base 40: mod_base = OTHER; note = 2'-O-methyl cytidine phosphorothioate
  modified_base 41: mod_base = OTHER; note = 2'-O-methyl uridine phosphorothioate
  modified_base 42: mod_base = OTHER; note = 2'-O-methyl cytidine

SEQ ID NO: 289 - RNA, 42 nt, synthetic construct; identical to SEQ ID NO: 126
  source 1..42: mol_type = other RNA
  modified_base 1: mod_base = OTHER; note = 2'-O-methyl cytidine phosphorothioate
  modified_base 2: mod_base = OTHER; note = 2'-O-methyl uridine phosphorothioate
  modified_base 3: mod_base = OTHER; note = 2'-O-methyl guanosine phosphorothioate
  modified_base 4: mod_base = OTHER; note = 2'-O-methyl adenosine
  modified_base 5: mod_base = OTHER; note = 2'-O-methyl adenosine
  modified_base 9: mod_base = OTHER; note = 2'-O-methyl guanosine
  modified_base 10: mod_base = OTHER; note = 2'-O-methyl uridine
  modified_base 11: mod_base = OTHER; note = 2'-O-methyl guanosine
  modified_base 13: mod_base = OTHER; note = 2'-O-methyl cytidine
  modified_base 18: mod_base = OTHER; note = 2'-O-methyl uridine
  modified_base 20: mod_base = OTHER; note = 2'-O-methyl cytidine
  modified_base 21: mod_base = OTHER; note = 2'-O-methyl guanosine
  modified_base 22: mod_base = OTHER; note = 2'-O-methyl uridine
  modified_base 25: mod_base = OTHER; note = 2'-O-methyl guanosine
  modified_base 29: mod_base = OTHER; note = 2'-O-methyl uridine
  modified_base 30: mod_base = OTHER; note = 2'-O-methyl adenosine
  modified_base 31: mod_base = OTHER; note = 2'-O-methyl guanosine
  modified_base 32: mod_base = OTHER; note = 2'-O-methyl cytidine
  modified_base 38: mod_base = OTHER; note = 2'-O-methyl uridine
  modified_base 39: mod_base = OTHER; note = 2'-O-methyl uridine phosphorothioate
  modified_base 40: mod_base = OTHER; note = 2'-O-methyl cytidine phosphorothioate
  modified_base 41: mod_base = OTHER; note = 2'-O-methyl uridine phosphorothioate
  modified_base 42: mod_base = OTHER; note = 2'-O-methyl cytidine

SEQ ID NO: 290 - RNA, 42 nt, synthetic construct; identical to SEQ ID NO: 126
  source 1..42: mol_type = other RNA
  modified_base 1: mod_base = OTHER; note = 2'-O-methyl cytidine phosphorothioate
  modified_base 2: mod_base = OTHER; note = 2'-O-methyl uridine phosphorothioate
  modified_base 3: mod_base = OTHER; note = 2'-O-methyl guanosine phosphorothioate
  modified_base 4: mod_base = OTHER; note = 2'-O-methyl adenosine
  modified_base 5: mod_base = OTHER; note = 2'-O-methyl adenosine
  modified_base 9: mod_base = OTHER; note = 2'-O-methyl guanosine
  modified_base 10: mod_base = OTHER; note = 2'-O-methyl uridine
  modified_base 11: mod_base = OTHER; note = 2'-O-methyl guanosine
  modified_base 13: mod_base = OTHER; note = 2'-O-methyl cytidine
  modified_base 18: mod_base = OTHER; note = 2'-O-methyl uridine
  modified_base 20: mod_base = OTHER; note = 2'-O-methyl cytidine
  modified_base 21: mod_base = OTHER; note = 2'-fluoro guanosine
  modified_base 22: mod_base = OTHER; note = 2'-O-methyl uridine
  modified_base 25: mod_base = OTHER; note = 2'-O-methyl guanosine
  modified_base 29: mod_base = OTHER; note = 2'-O-methyl uridine
  modified_base 30: mod_base = OTHER; note = 2'-O-methyl adenosine
  modified_base 31: mod_base = OTHER; note = 2'-O-methyl guanosine
  modified_base 32: mod_base = OTHER; note = 2'-O-methyl cytidine
  modified_base 38: mod_base = OTHER; note = 2'-O-methyl uridine
  modified_base 39: mod_base = OTHER; note = 2'-O-methyl uridine phosphorothioate
  modified_base 40: mod_base = OTHER; note = 2'-O-methyl cytidine phosphorothioate
  modified_base 41: mod_base = OTHER; note = 2'-O-methyl uridine phosphorothioate
  modified_base 42: mod_base = OTHER; note = 2'-O-methyl cytidine

SEQ ID NO: 291 - RNA, 42 nt, synthetic construct; identical to SEQ ID NO: 126
  source 1..42: mol_type = other RNA
  modified_base 1: mod_base = OTHER; note = 2'-O-methyl cytidine phosphorothioate
  modified_base 2: mod_base = OTHER; note = 2'-O-methyl uridine phosphorothioate
  modified_base 3: mod_base = OTHER; note = 2'-O-methyl guanosine phosphorothioate
  modified_base 4: mod_base = OTHER; note = 2'-O-methyl adenosine
  modified_base 5: mod_base = OTHER; note = 2'-O-methyl adenosine
  modified_base 9: mod_base = OTHER; note = 2'-O-methyl guanosine
  modified_base 10: mod_base = OTHER; note = 2'-O-methyl uridine
  modified_base 11: mod_base = OTHER; note = 2'-O-methyl guanosine
  modified_base 13: mod_base = OTHER; note = 2'-O-methyl cytidine
  modified_base 18: mod_base = OTHER; note = 2'-O-methyl uridine
  modified_base 22: mod_base = OTHER; note = 2'-O-methyl uridine
  modified_base 23: mod_base = OTHER; note = 2'-O-methyl cytidine
  modified_base 24: mod_base = OTHER; note = 2'-O-methyl guanosine
  modified_base 25: mod_base = OTHER; note = 2'-O-methyl guanosine
  modified_base 29: mod_base = OTHER; note = 2'-O-methyl uridine
  modified_base 30: mod_base = OTHER; note = 2'-O-methyl adenosine
  modified_base 31: mod_base = OTHER; note = 2'-O-methyl guanosine
  modified_base 32: mod_base = OTHER; note = 2'-O-methyl cytidine
  modified_base 38: mod_base = OTHER; note = 2'-O-methyl uridine
  modified_base 39: mod_base = OTHER; note = 2'-O-methyl uridine phosphorothioate
  modified_base 40: mod_base = OTHER; note = 2'-O-methyl cytidine phosphorothioate
  modified_base 41: mod_base = OTHER; note = 2'-O-methyl uridine phosphorothioate
  modified_base 42: mod_base = OTHER; note = 2'-O-methyl cytidine

SEQ ID NO: 292 - RNA, 42 nt, synthetic construct; identical to SEQ ID NO: 126
  source 1..42: mol_type = other RNA
  modified_base 1: mod_base = OTHER; note = 2'-O-methyl cytidine phosphorothioate
  modified_base 2: mod_base = OTHER; note = 2'-O-methyl uridine phosphorothioate
  modified_base 3: mod_base = OTHER; note = 2'-O-methyl guanosine phosphorothioate
  modified_base 4: mod_base = OTHER; note = 2'-O-methyl adenosine
  modified_base 5: mod_base = OTHER; note = 2'-O-methyl adenosine
  modified_base 9: mod_base = OTHER; note = 2'-O-methyl guanosine
  modified_base 10: mod_base = OTHER; note = 2'-O-methyl uridine
  modified_base 11: mod_base = OTHER; note = 2'-O-methyl guanosine
  modified_base 13: mod_base = OTHER; note = 2'-O-methyl cytidine
  modified_base 18: mod_base = OTHER; note = 2'-O-methyl uridine
  modified_base 20: mod_base = OTHER; note = 2'-fluoro cytidine
  modified_base 21: mod_base = OTHER; note = 2'-O-methyl guanosine
  modified_base 22: mod_base = OTHER; note = 2'-O-methyl uridine
  modified_base 23: mod_base = OTHER; note = 2'-O-methyl cytidine
  modified_base 24: mod_base = OTHER; note = 2'-O-methyl guanosine
  modified_base 25: mod_base = OTHER; note = 2'-O-methyl guanosine
  modified_base 29: mod_base = OTHER; note = 2'-O-methyl uridine
  modified_base 30: mod_base = OTHER; note = 2'-O-methyl adenosine
  modified_base 31: mod_base = OTHER; note = 2'-O-methyl guanosine
  modified_base 32: mod_base = OTHER; note = 2'-O-methyl cytidine
  modified_base 38: mod_base = OTHER; note = 2'-O-methyl uridine
  modified_base 39: mod_base = OTHER; note = 2'-O-methyl uridine phosphorothioate
  modified_base 40: mod_base = OTHER; note = 2'-O-methyl cytidine phosphorothioate
  modified_base 41: mod_base = OTHER; note = 2'-O-methyl uridine phosphorothioate
  modified_base 42: mod_base = OTHER; note = 2'-O-methyl cytidine

SEQ ID NO: 293 - RNA, 42 nt, synthetic construct; identical to SEQ ID NO: 126
  source 1..42: mol_type = other RNA
  modified_base 1: mod_base = OTHER; note = 2'-O-methyl cytidine phosphorothioate
  modified_base 2: mod_base = OTHER; note = 2'-O-methyl uridine phosphorothioate
  modified_base 3: mod_base = OTHER; note = 2'-O-methyl guanosine phosphorothioate
  modified_base 4: mod_base = OTHER; note = 2'-O-methyl adenosine
  modified_base 5: mod_base = OTHER; note = 2'-O-methyl adenosine
  modified_base 9: mod_base = OTHER; note = 2'-O-methyl guanosine
  modified_base 10: mod_base = OTHER; note = 2'-O-methyl uridine
  modified_base 11: mod_base = OTHER; note = 2'-O-methyl guanosine
  modified_base 13: mod_base = OTHER; note = 2'-O-methyl cytidine
  modified_base 18: mod_base = OTHER; note = 2'-O-methyl uridine
  modified_base 20: mod_base = OTHER; note = 2'-fluoro cytidine
  modified_base 21: mod_base = OTHER; note = 2'-fluoro guanosine
  modified_base 22: mod_base = OTHER; note = 2'-O-methyl uridine
  modified_base 23: mod_base = OTHER; note = 2'-O-methyl cytidine
  modified_base 24: mod_base = OTHER; note = 2'-O-methyl guanosine
  modified_base 25: mod_base = OTHER; note = 2'-O-methyl guanosine
  modified_base 29: mod_base = OTHER; note = 2'-O-methyl uridine
  modified_base 30: mod_base = OTHER; note = 2'-O-methyl adenosine
  modified_base 31: mod_base = OTHER; note = 2'-O-methyl guanosine
  modified_base 32: mod_base = OTHER; note = 2'-O-methyl cytidine
  modified_base 38: mod_base = OTHER; note = 2'-O-methyl uridine
  modified_base 39: mod_base = OTHER; note = 2'-O-methyl uridine phosphorothioate
  modified_base 40: mod_base = OTHER; note = 2'-O-methyl cytidine phosphorothioate
  modified_base 41: mod_base = OTHER; note = 2'-O-methyl uridine phosphorothioate
  modified_base 42: mod_base = OTHER; note = 2'-O-methyl cytidine

SEQ ID NO: 294 - RNA, 42 nt, synthetic construct; identical to SEQ ID NO: 126
  source 1..42: mol_type = other RNA
  modified_base 1: mod_base = OTHER; note = 2'-O-methyl cytidine phosphorothioate
  modified_base 2: mod_base = OTHER; note = 2'-O-methyl uridine phosphorothioate
  modified_base 3: mod_base = OTHER; note = 2'-O-methyl guanosine phosphorothioate
  modified_base 4: mod_base = OTHER; note = 2'-O-methyl adenosine
  modified_base 5: mod_base = OTHER; note = 2'-O-methyl adenosine
  modified_base 9: mod_base = OTHER; note = 2'-O-methyl guanosine
  modified_base 10: mod_base = OTHER; note = 2'-O-methyl uridine
  modified_base 11: mod_base = OTHER; note = 2'-O-methyl guanosine
  modified_base 13: mod_base = OTHER; note = 2'-O-methyl cytidine
  modified_base 18: mod_base = OTHER; note = 2'-O-methyl uridine
  modified_base 20: mod_base = OTHER; note = 2'-O-methyl cytidine
  modified_base 21: mod_base = OTHER; note = 2'-O-methyl guanosine
  modified_base 22: mod_base = OTHER; note = 2'-O-methyl uridine
  modified_base 23: mod_base = OTHER; note = 2'-O-methyl cytidine
  modified_base 24: mod_base = OTHER; note = 2'-O-methyl guanosine
  modified_base 25: mod_base = OTHER; note = 2'-O-methyl guanosine
  modified_base 29: mod_base = OTHER; note = 2'-O-methyl uridine
  modified_base 30: mod_base = OTHER; note = 2'-O-methyl adenosine
  modified_base 31: mod_base = OTHER; note = 2'-O-methyl guanosine
  modified_base 32: mod_base = OTHER; note = 2'-O-methyl cytidine
  modified_base 38: mod_base = OTHER; note = 2'-O-methyl uridine
  modified_base 39: mod_base = OTHER; note = 2'-O-methyl uridine phosphorothioate
  modified_base 40: mod_base = OTHER; note = 2'-O-methyl cytidine phosphorothioate
  modified_base 41: mod_base = OTHER; note = 2'-O-methyl uridine phosphorothioate
  modified_base 42: mod_base = OTHER; note = 2'-O-methyl cytidine

SEQ ID NO: 295 - RNA, 42 nt, synthetic construct; identical to SEQ ID NO: 126
  source 1..42: mol_type = other RNA
  modified_base 1: mod_base = OTHER; note = 2'-O-methyl cytidine phosphorothioate
  modified_base 2: mod_base = OTHER; note = 2'-O-methyl uridine phosphorothioate
  modified_base 3: mod_base = OTHER; note = 2'-O-methyl guanosine phosphorothioate
  modified_base 4: mod_base = OTHER; note = 2'-O-methyl adenosine
  modified_base 5: mod_base = OTHER; note = 2'-O-methyl adenosine
  modified_base 9: mod_base = OTHER; note = 2'-O-methyl guanosine
  modified_base 10: mod_base = OTHER; note = 2'-O-methyl uridine
  modified_base 11: mod_base = OTHER; note = 2'-O-methyl guanosine
  modified_base 13: mod_base = OTHER; note = 2'-O-methyl cytidine
  modified_base 18: mod_base = OTHER; note = 2'-O-methyl uridine
  modified_base 20: mod_base = OTHER; note = 2'-O-methyl cytidine
  modified_base 21: mod_base = OTHER; note = 2'-fluoro guanosine
  modified_base 22: mod_base = OTHER; note = 2'-O-methyl uridine
  modified_base 23: mod_base = OTHER; note = 2'-O-methyl cytidine
  modified_base 24: mod_base = OTHER; note = 2'-O-methyl guanosine
  modified_base 25: mod_base = OTHER; note = 2'-O-methyl guanosine
  modified_base 29: mod_base = OTHER; note = 2'-O-methyl uridine
  modified_base 30: mod_base = OTHER; note = 2'-O-methyl adenosine
  modified_base 31: mod_base = OTHER; note = 2'-O-methyl guanosine
  modified_base 32: mod_base = OTHER; note = 2'-O-methyl cytidine
  modified_base 38: mod_base = OTHER; note = 2'-O-methyl uridine
  modified_base 39: mod_base = OTHER; note = 2'-O-methyl uridine phosphorothioate
  modified_base 40: mod_base = OTHER; note = 2'-O-methyl cytidine phosphorothioate
  modified_base 41: mod_base = OTHER; note = 2'-O-methyl uridine phosphorothioate
  modified_base 42: mod_base = OTHER; note = 2'-O-methyl cytidine

SEQ ID NO: 296 - RNA, 42 nt, synthetic construct; identical to SEQ ID NO: 126
  source 1..42: mol_type = other RNA
  modified_base 1: mod_base = OTHER; note = 2'-O-methyl cytidine phosphorothioate
  modified_base 2: mod_base = OTHER; note = 2'-O-methyl uridine phosphorothioate
  modified_base 3: mod_base = OTHER; note = 2'-O-methyl guanosine phosphorothioate
  modified_base 4: mod_base = OTHER; note = 2'-O-methyl adenosine
  modified_base 5: mod_base = OTHER; note = 2'-O-methyl adenosine
  modified_base 9: mod_base = OTHER; note = 2'-O-methyl guanosine
  modified_base 10: mod_base = OTHER; note = 2'-O-methyl uridine
  modified_base 11: mod_base = OTHER; note = 2'-O-methyl guanosine
  modified_base 13: mod_base = OTHER; note = 2'-O-methyl cytidine
  modified_base 18: mod_base = OTHER; note = 2'-O-methyl uridine
  modified_base 19: mod_base = OTHER; note = 2'-fluoro adenosine
  modified_base 22: mod_base = OTHER; note = 2'-O-methyl uridine
  modified_base 23: mod_base = OTHER; note = 2'-O-methyl cytidine
  modified_base 24: mod_base = OTHER; note = 2'-O-methyl guanosine
  modified_base 25: mod_base = OTHER; note = 2'-O-methyl guanosine
  modified_base 29: mod_base = OTHER; note = 2'-O-methyl uridine
  modified_base 30: mod_base = OTHER; note = 2'-O-methyl adenosine
  modified_base 31: mod_base = OTHER; note = 2'-O-methyl guanosine
  modified_base 32: mod_base = OTHER; note = 2'-O-methyl cytidine
  modified_base 38: mod_base = OTHER; note = 2'-O-methyl uridine
  modified_base 39: mod_base = OTHER; note = 2'-O-methyl uridine phosphorothioate
  modified_base 40: mod_base = OTHER; note = 2'-O-methyl cytidine phosphorothioate
  modified_base 41: mod_base = OTHER; note = 2'-O-methyl uridine phosphorothioate
  modified_base 42: mod_base = OTHER; note = 2'-O-methyl cytidine

SEQ ID NO: 297 - DNA, 42 bp, synthetic construct; identical to SEQ ID NO: 174
  source 1..42: mol_type = other DNA
  modified_base 1: mod_base = OTHER; note = 2'-O-methyl cytidine phosphorothioate
  modified_base 2: mod_base = OTHER; note = 2'-O-methyl uridine phosphorothioate
  modified_base 3: mod_base = OTHER; note = 2'-O-methyl guanosine phosphorothioate
  modified_base 4: mod_base = OTHER; note = 2'-O-methyl adenosine
  modified_base 5: mod_base = OTHER; note = 2'-O-methyl adenosine
  modified_base 9: mod_base = OTHER; note = 2'-O-methyl guanosine
  modified_base 10: mod_base = OTHER; note = 2'-O-methyl uridine
  modified_base 11: mod_base = OTHER; note = 2'-O-methyl guanosine
  modified_base 13: mod_base = OTHER; note = 2'-O-methyl cytidine
  modified_base 18: mod_base = OTHER; note = 2'-O-methyl uridine
  modified_base 19: mod_base = OTHER; note = Deoxyadenosine phosphorothioate
  modified_base 22: mod_base = OTHER; note = 2'-O-methyl uridine
  modified_base 23: mod_base = OTHER; note = 2'-O-methyl cytidine
  modified_base 24: mod_base = OTHER; note = 2'-O-methyl guanosine
  modified_base 25: mod_base = OTHER; note = 2'-O-methyl guanosine
  modified_base 29: mod_base = OTHER; note = 2'-O-methyl uridine
  modified_base 30: mod_base = OTHER; note = 2'-O-methyl adenosine
  modified_base 31: mod_base = OTHER; note = 2'-O-methyl guanosine
  modified_base 32: mod_base = OTHER; note = 2'-O-methyl cytidine
  modified_base 38: mod_base = OTHER; note = 2'-O-methyl uridine
  modified_base 39: mod_base = OTHER; note = 2'-O-methyl uridine phosphorothioate
  modified_base 40: mod_base = OTHER; note = 2'-O-methyl cytidine phosphorothioate
  modified_base 41: mod_base = OTHER; note = 2'-O-methyl uridine phosphorothioate
  modified_base 42: mod_base = OTHER; note = 2'-O-methyl cytidine
  misc_feature 1..18: note = RNA
  misc_feature 19: note = DNA
  misc_feature 20..42: note = RNA

SEQ ID NO: 298 - RNA, 42 nt, synthetic construct; identical to SEQ ID NO: 126
  source 1..42: mol_type = other RNA
  modified_base 1: mod_base = OTHER; note = 2'-O-methyl cytidine phosphorothioate
  modified_base 2: mod_base = OTHER; note = 2'-O-methyl uridine phosphorothioate
  modified_base 3: mod_base = OTHER; note = 2'-O-methyl guanosine phosphorothioate
  modified_base 4: mod_base = OTHER; note = 2'-O-methyl adenosine
  modified_base 5: mod_base = OTHER; note = 2'-O-methyl adenosine
  modified_base 9: mod_base = OTHER; note = 2'-O-methyl guanosine
  modified_base 10: mod_base = OTHER; note = 2'-O-methyl uridine
  modified_base 11: mod_base = OTHER; note = 2'-O-methyl guanosine
  modified_base 13: mod_base = OTHER; note = 2'-O-methyl cytidine
  modified_base 18: mod_base = OTHER; note = 2'-O-methyl uridine
  modified_base 19: mod_base = OTHER; note = 2'-O-methyl adenosine
  modified_base 22: mod_base = OTHER; note = 2'-O-methyl uridine
  modified_base 23: mod_base = OTHER; note = 2'-O-methyl cytidine
  modified_base 24: mod_base = OTHER; note = 2'-O-methyl guanosine
  modified_base 25: mod_base = OTHER; note = 2'-O-methyl guanosine
  modified_base 29: mod_base = OTHER; note = 2'-O-methyl uridine
  modified_base 30: mod_base = OTHER; note = 2'-O-methyl adenosine
  modified_base 31: mod_base = OTHER; note = 2'-O-methyl guanosine
  modified_base 32: mod_base = OTHER; note = 2'-O-methyl cytidine
  modified_base 38: mod_base = OTHER; note = 2'-O-methyl uridine
  modified_base 39: mod_base = OTHER; note = 2'-O-methyl uridine phosphorothioate
  modified_base 40: mod_base = OTHER; note = 2'-O-methyl cytidine phosphorothioate
  modified_base 41: mod_base = OTHER; note = 2'-O-methyl uridine phosphorothioate
  modified_base 42: mod_base = OTHER; note = 2'-O-methyl cytidine

SEQ ID NO: 299 - RNA, 42 nt, synthetic construct; identical to SEQ ID NO: 126
  source 1..42: mol_type = other RNA
  modified_base 1: mod_base = OTHER; note = 2'-O-methyl cytidine phosphorothioate
  modified_base 2: mod_base = OTHER; note = 2'-O-methyl uridine phosphorothioate
  modified_base 3: mod_base = OTHER; note = 2'-O-methyl guanosine phosphorothioate
  modified_base 4: mod_base = OTHER; note = 2'-O-methyl adenosine
  modified_base 5: mod_base = OTHER; note = 2'-O-methyl adenosine
  modified_base 9: mod_base = OTHER; note = 2'-O-methyl guanosine
  modified_base 10: mod_base = OTHER; note = 2'-O-methyl uridine
  modified_base 11: mod_base = OTHER; note = 2'-O-methyl guanosine
  modified_base 13: mod_base = OTHER; note = 2'-O-methyl cytidine
  modified_base 18: mod_base = OTHER; note = 2'-O-methyl uridine
  modified_base 19: mod_base = OTHER; note = Adenosine phosphorothioate
  modified_base 22: mod_base = OTHER; note = 2'-O-methyl uridine
  modified_base 23: mod_base = OTHER; note = 2'-O-methyl cytidine
  modified_base 24: mod_base = OTHER; note = 2'-O-methyl guanosine
  modified_base 25: mod_base = OTHER; note = 2'-O-methyl guanosine
  modified_base 29: mod_base = OTHER; note = 2'-O-methyl uridine
  modified_base 30: mod_base = OTHER; note = 2'-O-methyl adenosine
  modified_base 31: mod_base = OTHER; note = 2'-O-methyl guanosine
  modified_base 32: mod_base = OTHER; note = 2'-O-methyl cytidine
  modified_base 38: mod_base = OTHER; note = 2'-O-methyl uridine
  modified_base 39: mod_base = OTHER; note = 2'-O-methyl uridine phosphorothioate
  modified_base 40: mod_base = OTHER; note = 2'-O-methyl cytidine phosphorothioate
  modified_base 41: mod_base = OTHER; note = 2'-O-methyl uridine phosphorothioate
  modified_base 42: mod_base = OTHER; note = 2'-O-methyl cytidine

SEQ ID NO: 300 - RNA, 42 nt, synthetic construct; identical to SEQ ID NO: 126
  source 1..42: mol_type = other RNA
  modified_base 1: mod_base = OTHER; note = 2'-O-methyl cytidine phosphorothioate
  modified_base 2: mod_base = OTHER; note = 2'-O-methyl uridine phosphorothioate
  modified_base 3: mod_base = OTHER; note = 2'-O-methyl guanosine phosphorothioate
  modified_base 4: mod_base = OTHER; note = 2'-O-methyl adenosine
  modified_base 5: mod_base = OTHER; note = 2'-O-methyl adenosine
  modified_base 9: mod_base = OTHER; note = 2'-O-methyl guanosine
  modified_base 10: mod_base = OTHER; note = 2'-O-methyl uridine
  modified_base 11: mod_base = OTHER; note = 2'-O-methyl guanosine
  modified_base 13: mod_base = OTHER; note = 2'-O-methyl cytidine
  modified_base 18: mod_base = OTHER; note = 2'-O-methyl uridine
  modified_base 22: mod_base = OTHER; note = 2'-O-methyl uridine
  modified_base 25: mod_base = OTHER; note = 2'-O-methyl guanosine
  modified_base 26: mod_base = OTHER; note = Uridine phosphorothioate
  modified_base 27: mod_base = OTHER; note = Uridine phosphorothioate
  modified_base 28: mod_base = OTHER; note = Guanosine phosphorothioate
  modified_base 29: mod_base = OTHER; note = 2'-O-methyl uridine
  modified_base 30: mod_base = OTHER; note = 2'-O-methyl adenosine
  modified_base 31: mod_base = OTHER; note = 2'-O-methyl guanosine
  modified_base 32: mod_base = OTHER; note = 2'-O-methyl cytidine
  modified_base 38: mod_base = OTHER; note = 2'-O-methyl uridine
  modified_base 39: mod_base = OTHER; note = 2'-O-methyl uridine phosphorothioate
  modified_base 40: mod_base = OTHER; note = 2'-O-methyl cytidine phosphorothioate
  modified_base 41: mod_base = OTHER; note = 2'-O-methyl uridine phosphorothioate
  modified_base 42: mod_base = OTHER; note = 2'-O-methyl cytidine

SEQ ID NO: 301 - RNA, 42 nt, synthetic construct; identical to SEQ ID NO: 126
  source 1..42: mol_type = other RNA
  modified_base 1: mod_base = OTHER; note = 2'-O-methyl cytidine phosphorothioate
  modified_base 2: mod_base = OTHER; note = 2'-O-methyl uridine phosphorothioate
  modified_base 3: mod_base = OTHER; note = 2'-O-methyl guanosine phosphorothioate
  modified_base 4: mod_base = OTHER; note = 2'-O-methyl adenosine
  modified_base 5: mod_base = OTHER; note = 2'-O-methyl adenosine
  modified_base 9: mod_base = OTHER; note = 2'-O-methyl guanosine
  modified_base 10: mod_base = OTHER; note = 2'-O-methyl uridine
  modified_base 11: mod_base = OTHER; note = 2'-O-methyl guanosine
  modified_base 13: mod_base = OTHER; note = 2'-O-methyl cytidine
  modified_base 18: mod_base = OTHER; note = 2'-O-methyl uridine
  modified_base 22: mod_base = OTHER; note = 2'-O-methyl uridine
  modified_base 25: mod_base = OTHER; note = 2'-O-methyl guanosine
  modified_base 26: mod_base = OTHER; note = Uridine phosphorothioate
  modified_base 27: mod_base = OTHER; note = Uridine phosphorothioate
  modified_base 28: mod_base = OTHER; note = 2'-O-methyl guanosine
  modified_base 29: mod_base = OTHER; note = 2'-O-methyl uridine
  modified_base 30: mod_base = OTHER; note = 2'-O-methyl adenosine
  modified_base 31: mod_base = OTHER; note = 2'-O-methyl guanosine
  modified_base 32: mod_base = OTHER; note = 2'-O-methyl cytidine
  modified_base 38: mod_base = OTHER; note = 2'-O-methyl uridine
  modified_base 39: mod_base = OTHER; note = 2'-O-methyl uridine phosphorothioate
  modified_base 40: mod_base = OTHER; note = 2'-O-methyl cytidine phosphorothioate
  modified_base 41: mod_base = OTHER; note = 2'-O-methyl uridine phosphorothioate
  modified_base 42: mod_base = OTHER; note = 2'-O-methyl cytidine

SEQ ID NO: 302 - RNA, 42 nt, synthetic construct; identical to SEQ ID NO: 126
  source 1..42: mol_type = other RNA
  modified_base 1: mod_base = OTHER; note = 2'-O-methyl cytidine phosphorothioate
  modified_base 2: mod_base = OTHER; note = 2'-O-methyl uridine phosphorothioate
  modified_base 3: mod_base = OTHER; note = 2'-O-methyl guanosine phosphorothioate
  modified_base 4: mod_base = OTHER; note = 2'-O-methyl adenosine
  modified_base 5: mod_base = OTHER; note = 2'-O-methyl adenosine
  modified_base 9: mod_base = OTHER; note = 2'-O-methyl guanosine
  modified_base 10: mod_base = OTHER; note = 2'-O-methyl uridine
  modified_base 11: mod_base = OTHER; note = 2'-O-methyl guanosine
  modified_base 13: mod_base = OTHER; note = 2'-O-methyl cytidine
  modified_base 18: mod_base = OTHER; note = 2'-O-methyl uridine
  modified_base 22: mod_base = OTHER; note = 2'-O-methyl uridine
  modified_base 25: mod_base = OTHER; note = 2'-O-methyl guanosine
  modified_base 26: mod_base = OTHER; note = Uridine phosphorothioate
  modified_base 28: mod_base = OTHER; note = Guanosine phosphorothioate
  modified_base 29: mod_base = OTHER; note = 2'-O-methyl uridine
  modified_base 30: mod_base = OTHER; note = 2'-O-methyl adenosine
  modified_base 31: mod_base = OTHER; note = 2'-O-methyl guanosine
  modified_base 32: mod_base = OTHER; note = 2'-O-methyl cytidine
  modified_base 38: mod_base = OTHER; note = 2'-O-methyl uridine
  modified_base 39: mod_base = OTHER; note = 2'-O-methyl uridine phosphorothioate
  modified_base 40: mod_base = OTHER; note = 2'-O-methyl cytidine phosphorothioate
  modified_base 41: mod_base = OTHER; note = 2'-O-methyl uridine phosphorothioate
  modified_base 42: mod_base = OTHER; note = 2'-O-methyl cytidine

SEQ ID NO: 303 - RNA, 42 nt, synthetic construct; identical to SEQ ID NO: 126
  source 1..42: mol_type = other RNA
  modified_base 1: mod_base = OTHER; note = 2'-O-methyl cytidine phosphorothioate
  modified_base 2: mod_base = OTHER; note = 2'-O-methyl uridine phosphorothioate
  modified_base 3: mod_base = OTHER; note = 2'-O-methyl guanosine phosphorothioate
  modified_base 4: mod_base = OTHER; note = 2'-O-methyl adenosine
  modified_base 5: mod_base = OTHER; note = 2'-O-methyl adenosine
  modified_base 9: mod_base = OTHER; note = 2'-O-methyl guanosine
  modified_base 10: mod_base = OTHER; note = 2'-O-methyl uridine
  modified_base 11: mod_base = OTHER; note = 2'-O-methyl guanosine
  modified_base 13: mod_base = OTHER; note = 2'-O-methyl cytidine
  modified_base 18: mod_base = OTHER; note = 2'-O-methyl uridine
  modified_base 22: mod_base = OTHER; note = 2'-O-methyl uridine
  modified_base 25: mod_base = OTHER; note = 2'-O-methyl guanosine
  modified_base 26: mod_base = OTHER; note = Uridine phosphorothioate
  modified_base 28: mod_base = OTHER; note = 2'-O-methyl guanosine
  modified_base 29: mod_base = OTHER; note = 2'-O-methyl uridine
  modified_base 30: mod_base = OTHER; note = 2'-O-methyl adenosine
  modified_base 31: mod_base = OTHER; note = 2'-O-methyl guanosine
  modified_base 32: mod_base = OTHER; note = 2'-O-methyl cytidine
  modified_base 38: mod_base = OTHER; note = 2'-O-methyl uridine
  modified_base 39: mod_base = OTHER; note = 2'-O-methyl uridine phosphorothioate
  modified_base 40: mod_base = OTHER; note = 2'-O-methyl cytidine phosphorothioate
  modified_base 41: mod_base = OTHER; note = 2'-O-methyl uridine phosphorothioate
  modified_base 42: mod_base = OTHER; note = 2'-O-methyl cytidine

SEQ ID NO: 304 - RNA, 42 nt, synthetic construct; identical to SEQ ID NO: 126
  source 1..42: mol_type = other RNA
  modified_base 1: mod_base = OTHER; note = 2'-O-methyl cytidine phosphorothioate
  modified_base 2: mod_base = OTHER; note = 2'-O-methyl uridine phosphorothioate
  modified_base 3: mod_base = OTHER; note = 2'-O-methyl guanosine phosphorothioate
  modified_base 4: mod_base = OTHER; note = 2'-O-methyl adenosine
  modified_base 5: mod_base = OTHER; note = 2'-O-methyl adenosine
  modified_base 9: mod_base = OTHER; note = 2'-O-methyl guanosine
  modified_base 10: mod_base = OTHER; note = 2'-O-methyl uridine
  modified_base 11: mod_base = OTHER; note = 2'-O-methyl guanosine
  modified_base 13: mod_base = OTHER; note = 2'-O-methyl cytidine
  modified_base 18: mod_base = OTHER; note = 2'-O-methyl uridine
  modified_base 22: mod_base = OTHER; note = 2'-O-methyl uridine
  modified_base 25: mod_base = OTHER; note = 2'-O-methyl guanosine
  modified_base 29: mod_base = OTHER; note = 2'-O-methyl uridine
  modified_base 30: mod_base = OTHER; note = 2'-O-methyl adenosine
  modified_base 31: mod_base = OTHER; note = 2'-O-methyl guanosine
  modified_base 32: mod_base = OTHER; note = 2'-O-methyl cytidine
  modified_base 33: mod_base = OTHER; note = Uridine phosphorothioate
  modified_base 34: mod_base = OTHER; note = Cytidine phosphorothioate
  modified_base 35: mod_base = OTHER; note = Cytidine phosphorothioate
  modified_base 37: mod_base = OTHER; note = Uridine phosphorothioate
  modified_base 38: mod_base = OTHER; note = 2'-O-methyl uridine
  modified_base 39: mod_base = OTHER; note = 2'-O-methyl uridine phosphorothioate
  modified_base 40: mod_base = OTHER; note = 2'-O-methyl cytidine phosphorothioate
  modified_base 41: mod_base = OTHER; note = 2'-O-methyl uridine phosphorothioate
  modified_base 42: mod_base = OTHER; note = 2'-O-methyl cytidine

SEQ ID NO: 305 - RNA, 42 nt, synthetic construct; identical to SEQ ID NO: 126
  source 1..42: mol_type = other RNA
  modified_base 1: mod_base = OTHER; note = 2'-O-methyl cytidine phosphorothioate
  modified_base 2: mod_base = OTHER; note = 2'-O-methyl uridine phosphorothioate
  modified_base 3: mod_base = OTHER; note = 2'-O-methyl guanosine phosphorothioate
  modified_base 4: mod_base = OTHER; note = 2'-O-methyl adenosine
  modified_base 5: mod_base = OTHER; note = 2'-O-methyl adenosine
  modified_base 9: mod_base = OTHER; note = 2'-O-methyl guanosine
  modified_base 10: mod_base = OTHER; note = 2'-O-methyl uridine
  modified_base 11: mod_base = OTHER; note = 2'-O-methyl guanosine
  modified_base 13: mod_base = OTHER; note = 2'-O-methyl cytidine
  modified_base 18: mod_base = OTHER; note = 2'-O-methyl uridine
  modified_base 22: mod_base = OTHER; note = 2'-O-methyl uridine
  modified_base 25: mod_base = OTHER; note = 2'-O-methyl guanosine
  modified_base 29: mod_base = OTHER; note = 2'-O-methyl uridine
  modified_base 30: mod_base = OTHER; note = 2'-O-methyl adenosine
  modified_base 31: mod_base = OTHER; note = 2'-O-methyl guanosine
  modified_base 32: mod_base = OTHER; note = 2'-O-methyl cytidine
  modified_base 33: mod_base = OTHER; note = 2'-O-methyl uridine
  modified_base 34: mod_base = OTHER; note = Cytidine phosphorothioate
  modified_base 35: mod_base = OTHER; note = Cytidine phosphorothioate
  modified_base 37: mod_base = OTHER; note = Uridine phosphorothioate
  modified_base 38: mod_base = OTHER; note = 2'-O-methyl uridine
  modified_base 39: mod_base = OTHER; note = 2'-O-methyl uridine phosphorothioate
  modified_base 40: mod_base = OTHER; note = 2'-O-methyl cytidine phosphorothioate
  modified_base 41: mod_base = OTHER; note = 2'-O-methyl uridine phosphorothioate
  modified_base 42: mod_base = OTHER; note = 2'-O-methyl cytidine

SEQ ID NO: 306 - RNA, 42 nt, synthetic construct; identical to SEQ ID NO: 126
  source 1..42: mol_type = other RNA
  modified_base 1: mod_base = OTHER; note = 2'-O-methyl cytidine phosphorothioate
  modified_base 2: mod_base = OTHER; note = 2'-O-methyl uridine phosphorothioate
  modified_base 3: mod_base = OTHER; note = 2'-O-methyl guanosine phosphorothioate
  modified_base 4: mod_base = OTHER; note = 2'-O-methyl adenosine
  modified_base 5: mod_base = OTHER; note = 2'-O-methyl adenosine
  modified_base 9: mod_base = OTHER; note = 2'-O-methyl guanosine
  modified_base 10: mod_base = OTHER; note = 2'-O-methyl uridine
  modified_base 11: mod_base = OTHER; note = 2'-O-methyl guanosine
  modified_base 13: mod_base = OTHER; note = 2'-O-methyl cytidine
  modified_base 18: mod_base = OTHER; note = 2'-O-methyl uridine
  modified_base 22: mod_base = OTHER; note = 2'-O-methyl uridine
  modified_base 25: mod_base = OTHER; note = 2'-O-methyl guanosine
  modified_base 29: mod_base = OTHER; note = 2'-O-methyl uridine
  modified_base 30: mod_base = OTHER; note = 2'-O-methyl adenosine
  modified_base 31: mod_base = OTHER; note = 2'-O-methyl guanosine
  modified_base 32: mod_base = OTHER; note = 2'-O-methyl cytidine
  modified_base 33: mod_base = OTHER; note = Uridine phosphorothioate
  modified_base 34: mod_base = OTHER; note = 2'-O-methyl cytidine
  modified_base 35: mod_base = OTHER; note = Cytidine phosphorothioate
  modified_base 37: mod_base = OTHER; note = Uridine phosphorothioate
  modified_base 38: mod_base = OTHER; note = 2'-O-methyl uridine
  modified_base 39: mod_base = OTHER; note = 2'-O-methyl uridine phosphorothioate
  modified_base 40: mod_base = OTHER; note = 2'-O-methyl cytidine phosphorothioate
  modified_base 41: mod_base = OTHER; note = 2'-O-methyl uridine phosphorothioate
  modified_base 42: mod_base = OTHER; note = 2'-O-methyl cytidine

SEQ ID NO: 307 - RNA, 42 nt, synthetic construct; identical to SEQ ID NO: 126
  source 1..42: mol_type = other RNA
  modified_base 1: mod_base = OTHER; note = 2'-O-methyl cytidine phosphorothioate
  modified_base 2: mod_base = OTHER; note = 2'-O-methyl uridine phosphorothioate
  modified_base 3: mod_base = OTHER; note = 2'-O-methyl guanosine phosphorothioate
  modified_base 4: mod_base = OTHER; note = 2'-O-methyl adenosine
  modified_base 5: mod_base = OTHER; note = 2'-O-methyl adenosine
  modified_base 9: mod_base = OTHER; note = 2'-O-methyl guanosine
  modified_base 10: mod_base = OTHER; note = 2'-O-methyl uridine
  modified_base 11: mod_base = OTHER; note = 2'-O-methyl guanosine
  modified_base 13: mod_base = OTHER; note = 2'-O-methyl cytidine
  modified_base 18: mod_base = OTHER; note = 2'-O-methyl uridine
  modified_base 22: mod_base = OTHER; note = 2'-O-methyl uridine
  modified_base 25: mod_base = OTHER; note = 2'-O-methyl guanosine
  modified_base 29: mod_base = OTHER; note = 2'-O-methyl uridine
  modified_base 30: mod_base = OTHER; note = 2'-O-methyl adenosine
  modified_base 31: mod_base = OTHER; note = 2'-O-methyl guanosine
  modified_base 32: mod_base = OTHER; note = 2'-O-methyl cytidine
  modified_base 33: mod_base = OTHER; note = Uridine phosphorothioate
  modified_base 34: mod_base = OTHER; note = Cytidine phosphorothioate
  modified_base 35: mod_base = OTHER; note = 2'-O-methyl cytidine
  modified_base 37: mod_base = OTHER; note = Uridine phosphorothioate
  modified_base 38: mod_base = OTHER; note = 2'-O-methyl uridine
  modified_base 39: mod_base = OTHER; note = 2'-O-methyl uridine phosphorothioate
  modified_base 40: mod_base = OTHER; note = 2'-O-methyl cytidine phosphorothioate
  modified_base 41: mod_base = OTHER; note = 2'-O-methyl uridine phosphorothioate
  modified_base 42: mod_base = OTHER; note = 2'-O-methyl cytidine

SEQ ID NO: 308 - RNA, 42 nt, synthetic construct; identical to SEQ ID NO: 126
  source 1..42: mol_type = other RNA
  modified_base 1: mod_base = OTHER; note = 2'-O-methyl cytidine phosphorothioate
  modified_base 2: mod_base = OTHER; note = 2'-O-methyl uridine phosphorothioate
  modified_base 3: mod_base = OTHER; note = 2'-O-methyl guanosine phosphorothioate
  modified_base 4: mod_base = OTHER; note = 2'-O-methyl adenosine
  modified_base 5: mod_base = OTHER; note = 2'-O-methyl adenosine
  modified_base 9: mod_base = OTHER; note = 2'-O-methyl guanosine
  modified_base 10: mod_base = OTHER; note = 2'-O-methyl uridine
  modified_base 11: mod_base = OTHER; note = 2'-O-methyl guanosine
  modified_base 13: mod_base = OTHER; note = 2'-O-methyl cytidine
  modified_base 18: mod_base = OTHER; note = 2'-O-methyl uridine
  modified_base 22: mod_base = OTHER; note = 2'-O-methyl uridine
  modified_base 25: mod_base = OTHER; note = 2'-O-methyl guanosine
  modified_base 29: mod_base = OTHER; note = 2'-O-methyl uridine
  modified_base 30: mod_base = OTHER; note = 2'-O-methyl adenosine
  modified_base 31: mod_base = OTHER; note = 2'-O-methyl guanosine
  modified_base 32: mod_base = OTHER; note = 2'-O-methyl cytidine
  modified_base 33: mod_base = OTHER; note = Uridine phosphorothioate
  modified_base 34: mod_base = OTHER; note = Cytidine phosphorothioate
  modified_base 37: mod_base = OTHER; note = Uridine phosphorothioate
  modified_base 38: mod_base = OTHER; note = 2'-O-methyl uridine
  modified_base 39: mod_base = OTHER; note = 2'-O-methyl uridine phosphorothioate
  modified_base 40: mod_base = OTHER; note = 2'-O-methyl cytidine phosphorothioate
  modified_base 41: mod_base = OTHER; note = 2'-O-methyl uridine phosphorothioate
  modified_base 42: mod_base = OTHER; note = 2'-O-methyl cytidine

SEQ ID NO: 309 - RNA, 42 nt, synthetic construct; identical to SEQ ID NO: 126
  source 1..42: mol_type = other RNA
  modified_base 1: mod_base = OTHER; note = 2'-O-methyl cytidine phosphorothioate
  modified_base 2: mod_base = OTHER; note = 2'-O-methyl uridine phosphorothioate
  modified_base 3: mod_base = OTHER; note = 2'-O-methyl guanosine phosphorothioate
  modified_base 4: mod_base = OTHER; note = 2'-O-methyl adenosine
  modified_base 5: mod_base = OTHER; note = 2'-O-methyl adenosine
  modified_base 9: mod_base = OTHER; note = 2'-O-methyl guanosine
  modified_base 10: mod_base = OTHER; note = 2'-O-methyl uridine
  modified_base 11: mod_base = OTHER; note = 2'-O-methyl guanosine
  modified_base 13: mod_base = OTHER; note = 2'-O-methyl cytidine
  modified_base 18: mod_base = OTHER; note = 2'-O-methyl uridine
  modified_base 22: mod_base = OTHER; note = 2'-O-methyl uridine
  modified_base 25: mod_base = OTHER; note = 2'-O-methyl guanosine
  modified_base 29: mod_base = OTHER; note = 2'-O-methyl uridine
  modified_base 30: mod_base = OTHER; note = 2'-O-methyl adenosine
  modified_base 31: mod_base = OTHER; note = 2'-O-methyl guanosine
  modified_base 32: mod_base = OTHER; note = 2'-O-methyl cytidine
  modified_base 33: mod_base = OTHER; note = 2'-O-methyl uridine
  modified_base 34: mod_base = OTHER; note = Cytidine phosphorothioate
  modified_base 37: mod_base = OTHER; note = Uridine phosphorothioate
  modified_base 38: mod_base = OTHER; note = 2'-O-methyl uridine
  modified_base 39: mod_base = OTHER; note = 2'-O-methyl uridine phosphorothioate
  modified_base 40: mod_base = OTHER; note = 2'-O-methyl cytidine phosphorothioate
  modified_base 41: mod_base = OTHER; note = 2'-O-methyl uridine phosphorothioate
  modified_base 42: mod_base = OTHER; note = 2'-O-methyl cytidine

SEQ ID NO: 310 - RNA, 42 nt, synthetic construct; identical to SEQ ID NO: 126
  source 1..42: mol_type = other RNA
  modified_base 1: mod_base = OTHER; note = 2'-O-methyl cytidine phosphorothioate
  modified_base 2: mod_base = OTHER; note = 2'-O-methyl uridine phosphorothioate
  modified_base 3: mod_base = OTHER; note = 2'-O-methyl guanosine phosphorothioate
  modified_base 4: mod_base = OTHER; note = 2'-O-methyl adenosine
  modified_base 5: mod_base = OTHER; note = 2'-O-methyl adenosine
  modified_base 9: mod_base = OTHER; note = 2'-O-methyl guanosine
  modified_base 10: mod_base = OTHER; note = 2'-O-methyl uridine
  modified_base 11: mod_base = OTHER; note = 2'-O-methyl guanosine
  modified_base 13: mod_base = OTHER; note = 2'-O-methyl cytidine
  modified_base 18: mod_base = OTHER; note = 2'-O-methyl uridine
  modified_base 22: mod_base = OTHER; note = 2'-O-methyl uridine
  modified_base 25: mod_base = OTHER; note = 2'-O-methyl guanosine
  modified_base 29: mod_base = OTHER; note = 2'-O-methyl uridine
  modified_base 30: mod_base = OTHER; note = 2'-O-methyl adenosine
  modified_base 31: mod_base = OTHER; note = 2'-O-methyl guanosine
  modified_base 32: mod_base = OTHER; note = 2'-O-methyl cytidine
  modified_base 33: mod_base = OTHER; note = Uridine phosphorothioate
  modified_base 34: mod_base = OTHER; note = 2'-O-methyl cytidine
  modified_base 37: mod_base = OTHER; note = Uridine phosphorothioate
  modified_base 38: mod_base = OTHER; note = 2'-O-methyl uridine
  modified_base 39: mod_base = OTHER; note = 2'-O-methyl uridine phosphorothioate
  modified_base 40: mod_base = OTHER; note = 2'-O-methyl cytidine phosphorothioate
  modified_base 41: mod_base = OTHER; note = 2'-O-methyl uridine phosphorothioate
  modified_base 42: mod_base = OTHER; note = 2'-O-methyl cytidine

SEQ ID NO: 311 - RNA, 42 nt, synthetic construct; identical to SEQ ID NO: 126
  source 1..42: mol_type = other RNA
  modified_base 1: mod_base = OTHER; note = 2'-O-methyl cytidine phosphorothioate
  modified_base 2: mod_base = OTHER; note = 2'-O-methyl uridine phosphorothioate
  modified_base 3: mod_base = OTHER; note = 2'-O-methyl guanosine phosphorothioate
  modified_base 4: mod_base = OTHER; note = 2'-O-methyl adenosine
  modified_base 5: mod_base = OTHER; note = 2'-O-methyl adenosine
  modified_base 9: mod_base = OTHER; note = 2'-O-methyl guanosine
  modified_base 10: mod_base = OTHER; note = 2'-O-methyl uridine
  modified_base 11: mod_base = OTHER; note = 2'-O-methyl guanosine
  modified_base 13: mod_base = OTHER; note = 2'-O-methyl cytidine
  modified_base 18: mod_base = OTHER; note = 2'-O-methyl uridine
  modified_base 22: mod_base = OTHER; note = 2'-O-methyl uridine
  modified_base 25: mod_base = OTHER; note = 2'-O-methyl guanosine
  modified_base 29: mod_base = OTHER; note = 2'-O-methyl uridine
  modified_base 30: mod_base = OTHER; note = 2'-O-methyl adenosine
  modified_base 31: mod_base = OTHER; note = 2'-O-methyl guanosine
  modified_base 32: mod_base = OTHER; note = 2'-O-methyl cytidine
  modified_base 33: mod_base = OTHER; note = Uridine phosphorothioate
  modified_base 35: mod_base = OTHER; note = Cytidine phosphorothioate
  modified_base 37: mod_base = OTHER; note = Uridine phosphorothioate
  modified_base 38: mod_base = OTHER; note = 2'-O-methyl uridine
  modified_base 39: mod_base = OTHER; note = 2'-O-methyl uridine phosphorothioate
  modified_base 40: mod_base = OTHER; note = 2'-O-methyl cytidine phosphorothioate
  modified_base 41: mod_base = OTHER; note = 2'-O-methyl uridine phosphorothioate
  modified_base 42: mod_base = OTHER; note = 2'-O-methyl cytidine

SEQ ID NO: 312 - RNA, 42 nt, synthetic construct; identical to SEQ ID NO: 126
  source 1..42: mol_type = other RNA
  modified_base 1: mod_base = OTHER; note = 2'-O-methyl cytidine phosphorothioate
  modified_base 2: mod_base = OTHER; note = 2'-O-methyl uridine phosphorothioate
  modified_base 3: mod_base = OTHER; note = 2'-O-methyl guanosine phosphorothioate
  modified_base 4: mod_base = OTHER; note = 2'-O-methyl adenosine
  modified_base 5: mod_base = OTHER; note = 2'-O-methyl adenosine
  modified_base 9: mod_base = OTHER; note = 2'-O-methyl guanosine
  modified_base 10: mod_base = OTHER; note = 2'-O-methyl uridine
  modified_base 11: mod_base = OTHER; note = 2'-O-methyl guanosine
  modified_base 13: mod_base = OTHER; note = 2'-O-methyl cytidine
  modified_base 18: mod_base = OTHER; note = 2'-O-methyl uridine
  modified_base 22: mod_base = OTHER; note = 2'-O-methyl uridine
  modified_base 25: mod_base = OTHER; note = 2'-O-methyl guanosine
  modified_base 29: mod_base = OTHER; note = 2'-O-methyl uridine
  modified_base 30: mod_base = OTHER; note = 2'-O-methyl adenosine
  modified_base 31: mod_base = OTHER; note = 2'-O-methyl guanosine
  modified_base 32: mod_base = OTHER; note = 2'-O-methyl cytidine
  modified_base 33: mod_base = OTHER; note = Uridine phosphorothioate
  modified_base 35: mod_base = OTHER; note = 2'-O-methyl cytidine
  modified_base 37: mod_base = OTHER; note = Uridine phosphorothioate
  modified_base 38: mod_base = OTHER; note = 2'-O-methyl uridine
  modified_base 39: mod_base = OTHER; note = 2'-O-methyl uridine phosphorothioate
  modified_base 40: mod_base = OTHER; note = 2'-O-methyl cytidine phosphorothioate
  modified_base 41: mod_base = OTHER; note = 2'-O-methyl uridine phosphorothioate
  modified_base 42: mod_base = OTHER; note = 2'-O-methyl cytidine

SEQ ID NO: 313 - RNA, 42 nt, synthetic construct; identical to SEQ ID NO: 126
  source 1..42: mol_type = other RNA
  modified_base 1: mod_base = OTHER; note = 2'-O-methyl cytidine phosphorothioate
  modified_base 2: mod_base = OTHER; note = 2'-O-methyl uridine phosphorothioate
  modified_base 3: mod_base = OTHER; note = 2'-O-methyl guanosine phosphorothioate
  modified_base 4: mod_base = OTHER; note = 2'-O-methyl adenosine
  modified_base 5: mod_base = OTHER; note = 2'-O-methyl adenosine
  modified_base 9: mod_base = OTHER; note = 2'-O-methyl guanosine
  modified_base 10: mod_base = OTHER; note = 2'-O-methyl uridine
  modified_base 11: mod_base = OTHER; note = 2'-O-methyl guanosine
  modified_base 13: mod_base = OTHER; note = 2'-O-methyl cytidine
  modified_base 18: mod_base = OTHER; note = 2'-O-methyl uridine
  modified_base 22: mod_base = OTHER; note = 2'-O-methyl uridine
  modified_base 25: mod_base = OTHER; note = 2'-O-methyl guanosine
  modified_base 26: mod_base = OTHER; note = Uridine phosphorothioate
  modified_base 29: mod_base = OTHER; note = 2'-O-methyl uridine
  modified_base 30: mod_base = OTHER; note = 2'-O-methyl adenosine
  modified_base 31: mod_base = OTHER; note = 2'-O-methyl guanosine
  modified_base 32: mod_base = OTHER; note = 2'-O-methyl cytidine
  modified_base 33: mod_base = OTHER; note = Uridine phosphorothioate
  modified_base 34: mod_base = OTHER; note = Cytidine phosphorothioate
  modified_base 35: mod_base = OTHER; note = Cytidine phosphorothioate
  modified_base 37: mod_base = OTHER; note = Uridine phosphorothioate
  modified_base 38: mod_base = OTHER; note = 2'-O-methyl uridine
  modified_base 39: mod_base = OTHER; note = 2'-O-methyl uridine phosphorothioate
  modified_base 40: mod_base = OTHER; note = 2'-O-methyl cytidine phosphorothioate
  modified_base 41: mod_base = OTHER; note = 2'-O-methyl uridine phosphorothioate
  modified_base 42: mod_base = OTHER; note = 2'-O-methyl cytidine

SEQ ID NO: 314 - RNA, 48 nt, synthetic construct
  source 1..48: mol_type = other RNA
  modified_base 1: mod_base = OTHER; note = 2'-O-methyl cytidine phosphorothioate
  modified_base 2: mod_base = OTHER; note = 2'-O-methyl uridine phosphorothioate
  modified_base 3: mod_base = OTHER; note = 2'-O-methyl guanosine phosphorothioate
  modified_base 45: mod_base = OTHER; note = Uridine phosphorothioate
  modified_base 46: mod_base = OTHER; note = 2'-O-methyl uridine phosphorothioate
  modified_base 47: mod_base = OTHER; note = 2'-O-methyl cytidine phosphorothioate
  modified_base 48: mod_base = OTHER; note = 2'-O-methyl guanosine
ctgaacttgtggccgtttacgtcggttgtagctccctttctcatttcg

SEQ ID NO: 315 - RNA, 48 nt, synthetic construct; identical to SEQ ID NO: 314
  source 1..48: mol_type = other RNA
  modified_base 1: mod_base = OTHER; note = 2'-O-methyl cytidine phosphorothioate
  modified_base 2: mod_base = OTHER; note = 2'-O-methyl uridine phosphorothioate
  modified_base 3: mod_base = OTHER; note = 2'-O-methyl guanosine phosphorothioate
  modified_base 4: mod_base = OTHER; note = 2'-O-methyl adenosine
  modified_base 5: mod_base = OTHER; note = 2'-O-methyl adenosine
  modified_base 38: mod_base = OTHER; note = 2'-O-methyl uridine
  modified_base 39: mod_base = OTHER; note = 2'-O-methyl uridine
  modified_base 40: mod_base = OTHER; note = 2'-O-methyl cytidine
  modified_base 41: mod_base = OTHER; note = 2'-O-methyl uridine
  modified_base 42: mod_base = OTHER; note = 2'-O-methyl cytidine
  modified_base 43: mod_base = OTHER; note = 2'-O-methyl adenosine
  modified_base 44: mod_base = OTHER; note = 2'-O-methyl uridine
  modified_base 45: mod_base = OTHER; note = 2'-O-methyl uridine phosphorothioate
  modified_base 46: mod_base = OTHER; note = 2'-O-methyl uridine phosphorothioate
  modified_base 47: mod_base = OTHER; note = 2'-O-methyl cytidine phosphorothioate
  modified_base 48: mod_base = OTHER; note = 2'-O-methyl guanosine

SEQ ID NO: 316 - RNA, 48 nt, synthetic construct; identical to SEQ ID NO: 314
  source 1..48: mol_type = other RNA
  modified_base 1: mod_base = OTHER; note = 2'-O-methyl cytidine phosphorothioate
  modified_base 2: mod_base = OTHER; note = 2'-O-methyl uridine phosphorothioate
  modified_base 3: mod_base = OTHER; note = 2'-O-methyl guanosine phosphorothioate
  modified_base 4: mod_base = OTHER; note = 2'-O-methyl adenosine
  modified_base 5: mod_base = OTHER; note = 2'-O-methyl adenosine
  modified_base 9: mod_base = OTHER; note = 2'-O-methyl guanosine
  modified_base 10: mod_base = OTHER; note = 2'-O-methyl uridine
  modified_base 11: mod_base = OTHER; note = 2'-O-methyl guanosine
  modified_base 13: mod_base = OTHER; note = 2'-O-methyl cytidine
  modified_base 18: mod_base = OTHER; note = 2'-O-methyl uridine
  modified_base 22: mod_base = OTHER; note = 2'-O-methyl uridine
  modified_base 25: mod_base = OTHER; note = 2'-O-methyl guanosine
  modified_base 29: mod_base = OTHER; note = 2'-O-methyl uridine
  modified_base 30: mod_base = OTHER; note = 2'-O-methyl adenosine
  modified_base 31: mod_base = OTHER; note = 2'-O-methyl guanosine
  modified_base 32: mod_base = OTHER; note = 2'-O-methyl cytidine
  modified_base 38: mod_base = OTHER; note = 2'-O-methyl uridine
  modified_base 39: mod_base = OTHER; note = 2'-O-methyl uridine
  modified_base 40: mod_base = OTHER; note = 2'-O-methyl cytidine
  modified_base 41: mod_base = OTHER; note = 2'-O-methyl uridine
  modified_base 42: mod_base = OTHER; note = 2'-O-methyl cytidine
  modified_base 43: mod_base = OTHER; note = 2'-O-methyl adenosine
  modified_base 44: mod_base = OTHER; note = 2'-O-methyl uridine
  modified_base 45: mod_base = OTHER; note = 2'-O-methyl uridine phosphorothioate
  modified_base 46: mod_base = OTHER; note = 2'-O-methyl uridine phosphorothioate
  modified_base 47: mod_base = OTHER; note = 2'-O-methyl cytidine phosphorothioate
  modified_base 48: mod_base = OTHER; note = 2'-O-methyl guanosine

SEQ ID NO: 317 - DNA, 48 bp, synthetic construct
  source 1..48: mol_type = other DNA
  modified_base 1: mod_base = OTHER; note = 2'-O-methyl cytidine phosphorothioate
  modified_base 2: mod_base = OTHER; note = 2'-O-methyl uridine phosphorothioate
  modified_base 3: mod_base = OTHER; note = 2'-O-methyl guanosine phosphorothioate
  modified_base 4: mod_base = OTHER; note = 2'-O-methyl adenosine
  modified_base 5: mod_base = OTHER; note = 2'-O-methyl adenosine
  modified_base 6: mod_base = OTHER; note = 2'-O-methyl cytidine
  modified_base 7: mod_base = OTHER; note = Deoxythymidine phosphorothioate
  modified_base 8: mod_base = OTHER; note = 2'-O-methyl uridine
  modified_base 9: mod_base = OTHER; note = 2'-O-methyl guanosine
  modified_base 10: mod_base = OTHER; note = 2'-O-methyl uridine
  modified_base 11: mod_base = OTHER; note = 2'-O-methyl guanosine
  modified_base 13: mod_base = OTHER; note = 2'-O-methyl cytidine
  modified_base 18: mod_base = OTHER; note = 2'-O-methyl uridine
  modified_base 22: mod_base = OTHER; note = 2'-O-methyl uridine
  modified_base 25: mod_base = OTHER; note = 2'-O-methyl guanosine
  modified_base 29: mod_base = OTHER; note = 2'-O-methyl uridine
  modified_base 30: mod_base = OTHER; note = 2'-O-methyl adenosine
  modified_base 31: mod_base = OTHER; note = 2'-O-methyl guanosine
  modified_base 32: mod_base = OTHER; note = 2'-O-methyl cytidine
  modified_base 38: mod_base = OTHER; note = 2'-O-methyl uridine
  modified_base 39: mod_base = OTHER; note = 2'-O-methyl uridine
  modified_base 40: mod_base = OTHER; note = 2'-O-methyl cytidine
  modified_base 41: mod_base = OTHER; note = 2'-O-methyl uridine
  modified_base 42: mod_base = OTHER; note = 2'-O-methyl cytidine
  modified_base 43: mod_base = OTHER; note = 2'-O-methyl adenosine
  modified_base 44: mod_base = OTHER; note = 2'-O-methyl uridine
  modified_base 45: mod_base = OTHER; note = 2'-O-methyl uridine phosphorothioate
  modified_base 46: mod_base = OTHER; note = 2'-O-methyl uridine phosphorothioate
  modified_base 47: mod_base = OTHER; note = 2'-O-methyl cytidine phosphorothioate
  modified_base 48: mod_base = OTHER; note = 2'-O-methyl guanosine
  misc_feature 1..6: note = RNA
  misc_feature 7: note = DNA
  misc_feature 8..48: note = RNA
ctgaacttgtggccgtttacgtcggttgtagctccctttctcatttcg

SEQ ID NO: 318 - RNA, 48 nt, synthetic construct; identical to SEQ ID NO: 314
  source 1..48: mol_type = other RNA
  modified_base 1: mod_base = OTHER; note = 2'-O-methyl cytidine phosphorothioate
  modified_base 2: mod_base = OTHER; note = 2'-O-methyl uridine phosphorothioate
  modified_base 3: mod_base = OTHER; note = 2'-O-methyl guanosine phosphorothioate
  modified_base 4: mod_base = OTHER; note = 2'-O-methyl adenosine
  modified_base 5: mod_base = OTHER; note = 2'-O-methyl adenosine
  modified_base 9: mod_base = OTHER; note = 2'-O-methyl guanosine
  modified_base 10: mod_base = OTHER; note = 2'-O-methyl uridine
  modified_base 11: mod_base = OTHER; note = 2'-O-methyl guanosine
  modified_base 13: mod_base = OTHER; note = 2'-O-methyl cytidine
  modified_base 14: mod_base = OTHER; note = 2'-fluoro cytidine
  modified_base 15: mod_base = OTHER; note = 2'-O-methyl guanosine
  modified_base 16: mod_base = OTHER; note = 2'-fluoro uridine
  modified_base 17: mod_base = OTHER; note = 2'-O-methyl uridine
  modified_base 18: mod_base = OTHER; note = 2'-O-methyl uridine
  modified_base 22: mod_base = OTHER; note = 2'-O-methyl uridine
  modified_base 25: mod_base = OTHER; note = 2'-O-methyl guanosine
  modified_base 29: mod_base = OTHER; note = 2'-O-methyl uridine
  modified_base 30: mod_base = OTHER; note = 2'-O-methyl adenosine
  modified_base 31: mod_base = OTHER; note = 2'-O-methyl guanosine
  modified_base 32: mod_base = OTHER; note = 2'-O-methyl cytidine
  modified_base 38: mod_base = OTHER; note = 2'-O-methyl uridine
  modified_base 39: mod_base = OTHER; note = 2'-O-methyl uridine
  modified_base 40: mod_base = OTHER; note = 2'-O-methyl cytidine
  modified_base 41: mod_base = OTHER; note = 2'-O-methyl uridine
  modified_base 42: mod_base = OTHER; note = 2'-O-methyl cytidine
  modified_base 43: mod_base = OTHER; note = 2'-O-methyl adenosine
  modified_base 44: mod_base = OTHER; note = 2'-O-methyl uridine
  modified_base 45: mod_base = OTHER; note = 2'-O-methyl uridine phosphorothioate
  modified_base 46: mod_base = OTHER; note = 2'-O-methyl uridine phosphorothioate
  modified_base 47: mod_base = OTHER; note = 2'-O-methyl cytidine phosphorothioate
  modified_base 48: mod_base = OTHER; note = 2'-O-methyl guanosine

SEQ ID NO: 319 - DNA, 48 bp, synthetic construct; identical to SEQ ID NO: 317
  source 1..48: mol_type = other DNA
  modified_base 1: mod_base = OTHER; note = 2'-O-methyl cytidine phosphorothioate
  modified_base 2: mod_base = OTHER; note = 2'-O-methyl uridine phosphorothioate
  modified_base 3: mod_base = OTHER; note = 2'-O-methyl guanosine phosphorothioate
  modified_base 4: mod_base = OTHER; note = 2'-O-methyl adenosine
  modified_base 5: mod_base = OTHER; note = 2'-O-methyl adenosine
  modified_base 6: mod_base = OTHER; note = 2'-O-methyl cytidine
  modified_base 7: mod_base = OTHER; note = Deoxythymidine phosphorothioate
  modified_base 8: mod_base = OTHER; note = 2'-O-methyl uridine
  modified_base 9: mod_base = OTHER; note = 2'-O-methyl guanosine
  modified_base 10: mod_base = OTHER; note = 2'-O-methyl uridine
  modified_base 11: mod_base = OTHER; note = 2'-O-methyl guanosine
  modified_base 13: mod_base = OTHER; note = 2'-O-methyl cytidine
  modified_base 14: mod_base = OTHER; note = 2'-fluoro cytidine
  modified_base 15: mod_base = OTHER; note = 2'-O-methyl guanosine
  modified_base 16: mod_base = OTHER; note = 2'-fluoro uridine
  modified_base 17: mod_base = OTHER; note = 2'-O-methyl uridine
  modified_base 18: mod_base = OTHER; note = 2'-O-methyl uridine
  modified_base 22: mod_base = OTHER; note = 2'-O-methyl uridine
  modified_base 25: mod_base = OTHER; note = 2'-O-methyl guanosine
  modified_base 29: mod_base = OTHER; note = 2'-O-methyl uridine
  modified_base 30: mod_base = OTHER; note = 2'-O-methyl adenosine
  modified_base 31: mod_base = OTHER; note = 2'-O-methyl guanosine
  modified_base 32: mod_base = OTHER; note = 2'-O-methyl cytidine
  modified_base 38: mod_base = OTHER; note = 2'-O-methyl uridine
  modified_base 39: mod_base = OTHER; note = 2'-O-methyl uridine
  modified_base 40: mod_base = OTHER; note = 2'-O-methyl cytidine
  modified_base 41: mod_base = OTHER; note = 2'-O-methyl uridine
  modified_base 42: mod_base = OTHER; note = 2'-O-methyl cytidine
  modified_base 43: mod_base = OTHER; note = 2'-O-methyl adenosine
  modified_base 44: mod_base = OTHER; note = 2'-O-methyl uridine
  modified_base 45: mod_base = OTHER; note = 2'-O-methyl uridine phosphorothioate
  modified_base 46: mod_base = OTHER; note = 2'-O-methyl uridine phosphorothioate
  modified_base 47: mod_base = OTHER; note = 2'-O-methyl cytidine phosphorothioate
  modified_base 48: mod_base = OTHER; note = 2'-O-methyl guanosine
  misc_feature 1..6: note = RNA
  misc_feature 7: note = DNA
  misc_feature 8..48: note = RNA

SEQ ID NO: 320 - DNA, 48 bp, synthetic construct; identical to SEQ ID NO: 317
  source 1..48: mol_type = other DNA
  modified_base 1: mod_base = OTHER; note = 2'-O-methyl cytidine phosphorothioate
  modified_base 2: mod_base = OTHER; note = 2'-O-methyl uridine phosphorothioate
  modified_base 3: mod_base = OTHER; note = 2'-O-methyl guanosine phosphorothioate
  modified_base 4: mod_base = OTHER; note = 2'-O-methyl adenosine
  modified_base 5: mod_base = OTHER; note = 2'-O-methyl adenosine
  modified_base 6: mod_base = OTHER; note = 2'-O-methyl cytidine
  modified_base 7: mod_base = OTHER; note = Deoxythymidine phosphorothioate
  modified_base 8: mod_base = OTHER; note = 2'-O-methyl uridine
  modified_base 9: mod_base = OTHER; note = 2'-O-methyl guanosine
  modified_base 10: mod_base = OTHER; note = 2'-O-methyl uridine
  modified_base 11: mod_base = OTHER; note = 2'-O-methyl guanosine
  modified_base 12: mod_base = OTHER; note = 2'-O-methyl guanosine
  modified_base 13: mod_base = OTHER; note = 2'-O-methyl cytidine
  modified_base 14: mod_base = OTHER; note = 2'-fluoro cytidine
  modified_base 15: mod_base = OTHER; note = 2'-O-methyl guanosine
  modified_base 16: mod_base = OTHER; note = 2'-fluoro uridine
  modified_base 17: mod_base = OTHER; note = 2'-O-methyl uridine
  modified_base 18: mod_base = OTHER; note = 2'-O-methyl uridine
  modified_base 22: mod_base = OTHER; note = 2'-O-methyl uridine
  modified_base 25: mod_base = OTHER; note = 2'-O-methyl guanosine
  modified_base 29: mod_base = OTHER; note = 2'-O-methyl uridine
  modified_base 30: mod_base = OTHER; note = 2'-O-methyl adenosine
  modified_base 31: mod_base = OTHER; note = 2'-O-methyl guanosine
  modified_base 32: mod_base = OTHER; note = 2'-O-methyl cytidine
  modified_base 38: mod_base = OTHER; note = 2'-O-methyl uridine
  modified_base 39: mod_base = OTHER; note = 2'-O-methyl uridine
  modified_base 40: mod_base = OTHER; note = 2'-O-methyl cytidine
  modified_base 41: mod_base = OTHER; note = 2'-O-methyl uridine
  modified_base 42: mod_base = OTHER; note = 2'-O-methyl cytidine
  modified_base 43: mod_base = OTHER; note = 2'-O-methyl adenosine
  modified_base 44: mod_base = OTHER; note = 2'-O-methyl uridine
  modified_base 45: mod_base = OTHER; note = 2'-O-methyl uridine phosphorothioate
  modified_base 46: mod_base = OTHER; note = 2'-O-methyl uridine phosphorothioate
  modified_base 47: mod_base = OTHER; note = 2'-O-methyl cytidine phosphorothioate
  modified_base 48: mod_base = OTHER; note = 2'-O-methyl guanosine
  misc_feature 1..6: note = RNA
  misc_feature 7: note = DNA
  misc_feature 8..48: note = RNA

SEQ ID NO: 321 - RNA, 48 nt, synthetic construct; identical to SEQ ID NO: 314
  source 1..48: mol_type = other RNA
  modified_base 1: mod_base = OTHER; note = 2'-O-methyl cytidine phosphorothioate
  modified_base 2: mod_base = OTHER; note = 2'-O-methyl uridine phosphorothioate
  modified_base 3: mod_base = OTHER; note = 2'-O-methyl guanosine phosphorothioate
  modified_base 4: mod_base = OTHER; note = 2'-O-methyl adenosine
  modified_base 5: mod_base = OTHER; note = 2'-O-methyl adenosine
  modified_base 9: mod_base = OTHER; note = 2'-O-methyl guanosine
  modified_base 10: mod_base = OTHER; note = 2'-O-methyl uridine
  modified_base 11: mod_base = OTHER; note = 2'-O-methyl guanosine
  modified_base 13: mod_base = OTHER; note = 2'-O-methyl cytidine
  modified_base 18: mod_base = OTHER; note = 2'-O-methyl uridine
  modified_base 20: mod_base = OTHER; note = 2'-O-methyl cytidine
  modified_base 21: mod_base = OTHER; note = 2'-fluoro guanosine
  modified_base 22: mod_base = OTHER; note = 2'-O-methyl uridine
  modified_base 25: mod_base = OTHER; note = 2'-O-methyl guanosine
  modified_base 29: mod_base = OTHER; note = 2'-O-methyl uridine
  modified_base 30: mod_base = OTHER; note = 2'-O-methyl adenosine
  modified_base 31: mod_base = OTHER; note = 2'-O-methyl guanosine
  modified_base 32: mod_base = OTHER; note = 2'-O-methyl cytidine
  modified_base 38: mod_base = OTHER; note = 2'-O-methyl uridine
  modified_base 39: mod_base = OTHER; note = 2'-O-methyl uridine
  modified_base 40: mod_base = OTHER; note = 2'-O-methyl cytidine
  modified_base 41: mod_base = OTHER; note = 2'-O-methyl uridine
  modified_base 42: mod_base = OTHER; note = 2'-O-methyl cytidine
  modified_base 43: mod_base = OTHER; note = 2'-O-methyl adenosine
  modified_base 44: mod_base = OTHER; note = 2'-O-methyl uridine
  modified_base 45: mod_base = OTHER; note = 2'-O-methyl uridine phosphorothioate
  modified_base 46: mod_base = OTHER; note = 2'-O-methyl uridine phosphorothioate
  modified_base 47: mod_base = OTHER; note = 2'-O-methyl cytidine phosphorothioate
  modified_base 48: mod_base = OTHER; note = 2'-O-methyl guanosine

SEQ ID NO: 322 - RNA, 48 nt, synthetic construct; identical to SEQ ID NO: 314
  source 1..48: mol_type = other RNA
  modified_base 1: mod_base = OTHER; note = 2'-O-methyl cytidine phosphorothioate
  modified_base 2: mod_base = OTHER; note = 2'-O-methyl uridine phosphorothioate
  modified_base 3: mod_base = OTHER; note = 2'-O-methyl guanosine phosphorothioate
  modified_base 4: mod_base = OTHER; note = 2'-O-methyl adenosine
  modified_base 5: mod_base = OTHER; note = 2'-O-methyl adenosine
  modified_base 9: mod_base = OTHER; note = 2'-O-methyl guanosine
  modified_base 10: mod_base = OTHER; note = 2'-O-methyl uridine
  modified_base 11: mod_base = OTHER; note = 2'-O-methyl guanosine
  modified_base 13: mod_base = OTHER; note = 2'-O-methyl cytidine
  modified_base 18: mod_base = OTHER; note = 2'-O-methyl uridine
  modified_base 20: mod_base = OTHER; note = 2'-O-methyl cytidine
  modified_base 21: mod_base = OTHER; note = 2'-fluoro guanosine
  modified_base 22: mod_base = OTHER; note = 2'-O-methyl uridine
  modified_base 23: mod_base = OTHER; note = 2'-O-methyl cytidine
  modified_base 24: mod_base = OTHER; note = 2'-O-methyl guanosine
  modified_base 25: mod_base = OTHER; note = 2'-O-methyl guanosine
  modified_base 29: mod_base = OTHER; note = 2'-O-methyl uridine
  modified_base 30: mod_base = OTHER; note = 2'-O-methyl adenosine
  modified_base 31: mod_base = OTHER; note = 2'-O-methyl guanosine
  modified_base 32: mod_base = OTHER; note = 2'-O-methyl cytidine
  modified_base 38: mod_base = OTHER; note = 2'-O-methyl uridine
  modified_base 39: mod_base = OTHER; note = 2'-O-methyl uridine
  modified_base 40: mod_base = OTHER; note = 2'-O-methyl cytidine
  modified_base 41: mod_base = OTHER; note = 2'-O-methyl uridine
  modified_base 42: mod_base = OTHER; note = 2'-O-methyl cytidine
  modified_base 43: mod_base = OTHER; note = 2'-O-methyl adenosine
  modified_base 44: mod_base = OTHER; note = 2'-O-methyl uridine
  modified_base 45: mod_base = OTHER; note = 2'-O-methyl uridine phosphorothioate
  modified_base 46: mod_base = OTHER; note = 2'-O-methyl uridine phosphorothioate
  modified_base 47: mod_base = OTHER; note = 2'-O-methyl cytidine phosphorothioate
  modified_base 48: mod_base = OTHER; note = 2'-O-methyl guanosine

SEQ ID NO: 323 - RNA, 48 nt, synthetic construct; identical to SEQ ID NO: 314
  source 1..48: mol_type = other RNA
  modified_base 1: mod_base = OTHER; note = 2'-O-methyl cytidine phosphorothioate
  modified_base 2: mod_base = OTHER; note = 2'-O-methyl uridine phosphorothioate
  modified_base 3: mod_base = OTHER; note = 2'-O-methyl guanosine phosphorothioate
  modified_base 4: mod_base = OTHER; note = 2'-O-methyl adenosine
  modified_base 5: mod_base = OTHER; note = 2'-O-methyl adenosine
  modified_base 9: mod_base = OTHER; note = 2'-O-methyl guanosine
  modified_base 10: mod_base = OTHER; note = 2'-O-methyl uridine
  modified_base 11: mod_base = OTHER; note = 2'-O-methyl guanosine
  modified_base 13: mod_base = OTHER; note = 2'-O-methyl cytidine
  modified_base 18: mod_base = OTHER; note = 2'-O-methyl uridine
  modified_base 22: mod_base = OTHER; note = 2'-O-methyl uridine
  modified_base 25: mod_base = OTHER; note = 2'-O-methyl guanosine
  modified_base 26: mod_base = OTHER; note = Uridine phosphorothioate
  modified_base 28: mod_base = OTHER; note = Guanosine phosphorothioate
  modified_base 29: mod_base = OTHER; note = 2'-O-methyl uridine
  modified_base 30: mod_base = OTHER; note = 2'-O-methyl adenosine
  modified_base 31: mod_base = OTHER; note = 2'-O-methyl guanosine
  modified_base 32: mod_base = OTHER; note = 2'-O-methyl cytidine
  modified_base 38: mod_base = OTHER; note = 2'-O-methyl uridine
  modified_base 39: mod_base = OTHER; note = 2'-O-methyl uridine
  modified_base 40: mod_base = OTHER; note = 2'-O-methyl cytidine
  modified_base 41: mod_base = OTHER; note = 2'-O-methyl uridine
  modified_base 42: mod_base = OTHER; note = 2'-O-methyl cytidine
  modified_base 43: mod_base = OTHER; note = 2'-O-methyl adenosine
  modified_base 44: mod_base = OTHER; note = 2'-O-methyl uridine
  modified_base 45: mod_base = OTHER; note = 2'-O-methyl uridine phosphorothioate
  modified_base 46: mod_base = OTHER; note = 2'-O-methyl uridine phosphorothioate
  modified_base 47: mod_base = OTHER; note = 2'-O-methyl cytidine phosphorothioate
  modified_base 48: mod_base = OTHER; note = 2'-O-methyl guanosine

SEQ ID NO: 324 - RNA, 48 nt, synthetic construct; identical to SEQ ID NO: 314
  source 1..48: mol_type = other RNA
  modified_base 1: mod_base = OTHER; note = 2'-O-methyl cytidine phosphorothioate
  modified_base 2: mod_base = OTHER; note = 2'-O-methyl uridine phosphorothioate
  modified_base 3: mod_base = OTHER; note = 2'-O-methyl guanosine phosphorothioate
  modified_base 4: mod_base = OTHER; note = 2'-O-methyl adenosine
  modified_base 5: mod_base = OTHER; note = 2'-O-methyl adenosine
  modified_base 9: mod_base = OTHER; note = 2'-O-methyl guanosine
  modified_base 10: mod_base = OTHER; note = 2'-O-methyl uridine
  modified_base 11: mod_base = OTHER; note = 2'-O-methyl guanosine
  modified_base 13: mod_base = OTHER; note = 2'-O-methyl cytidine
  modified_base 18: mod_base = OTHER; note = 2'-O-methyl uridine
  modified_base 22: mod_base = OTHER; note = 2'-O-methyl uridine
  modified_base 25: mod_base = OTHER; note = 2'-O-methyl guanosine
  modified_base 29: mod_base = OTHER; note = 2'-O-methyl uridine
  modified_base 30: mod_base = OTHER; note = 2'-O-methyl adenosine
  modified_base 31: mod_base = OTHER; note = 2'-O-methyl guanosine
  modified_base 32: mod_base = OTHER; note = 2'-O-methyl cytidine
  modified_base 33: mod_base = OTHER; note = Uridine phosphorothioate
  modified_base 35: mod_base = OTHER; note = Cytidine phosphorothioate
  modified_base 37: mod_base = OTHER; note = Uridine phosphorothioate
  modified_base 38: mod_base = OTHER; note = 2'-O-methyl uridine
  modified_base 39: mod_base = OTHER; note = 2'-O-methyl uridine
  modified_base 40: mod_base = OTHER; note = 2'-O-methyl cytidine
  modified_base 41: mod_base = OTHER; note = 2'-O-methyl uridine
  modified_base 42: mod_base = OTHER; note = 2'-O-methyl cytidine
  modified_base 43: mod_base = OTHER; note = 2'-O-methyl adenosine
  modified_base 44: mod_base = OTHER; note = 2'-O-methyl uridine
  modified_base 45: mod_base = OTHER; note = 2'-O-methyl uridine phosphorothioate
  modified_base 46: mod_base = OTHER; note = 2'-O-methyl uridine phosphorothioate
  modified_base 47: mod_base = OTHER; note = 2'-O-methyl cytidine phosphorothioate
  modified_base 48: mod_base = OTHER; note = 2'-O-methyl guanosine

SEQ ID NO: 325 - RNA, 48 nt, synthetic construct; identical to SEQ ID NO: 314
  source 1..48: mol_type = other RNA
  modified_base 1: mod_base = OTHER; note = 2'-O-methyl cytidine phosphorothioate
  modified_base 2: mod_base = OTHER; note = 2'-O-methyl uridine phosphorothioate
  modified_base 3: mod_base = OTHER; note = 2'-O-methyl guanosine phosphorothioate
  modified_base 4: mod_base = OTHER; note = 2'-O-methyl adenosine
  modified_base 5: mod_base = OTHER; note = 2'-O-methyl adenosine
  modified_base 9: mod_base = OTHER; note = 2'-O-methyl guanosine
  modified_base 10: mod_base = OTHER; note = 2'-O-methyl uridine
  modified_base 11: mod_base = OTHER; note = 2'-O-methyl guanosine
  modified_base 13: mod_base = OTHER; note = 2'-O-methyl cytidine
  modified_base 18: mod_base = OTHER; note = 2'-O-methyl uridine
  modified_base 22: mod_base = OTHER; note = 2'-O-methyl uridine
  modified_base 25: mod_base = OTHER; note = 2'-O-methyl guanosine
  modified_base 26: mod_base = OTHER; note = Uridine phosphorothioate
  modified_base 29: mod_base = OTHER; note = 2'-O-methyl uridine
  modified_base 30: mod_base = OTHER; note = 2'-O-methyl adenosine
  modified_base 31: mod_base = OTHER; note = 2'-O-methyl guanosine
  modified_base 32: mod_base = OTHER; note = 2'-O-methyl cytidine
  modified_base 33: mod_base = OTHER; note = Uridine phosphorothioate
  modified_base 34: mod_base = OTHER; note = Cytidine phosphorothioate
  modified_base 35: mod_base = OTHER; note = Cytidine phosphorothioate
  modified_base 37: mod_base = OTHER; note = Uridine phosphorothioate
  modified_base 38: mod_base = OTHER; note = 2'-O-methyl uridine
  modified_base 39: mod_base = OTHER; note = 2'-O-methyl uridine
  modified_base 40: mod_base = OTHER; note = 2'-O-methyl cytidine
  modified_base 41: mod_base = OTHER; note = 2'-O-methyl uridine
  modified_base 42: mod_base = OTHER; note = 2'-O-methyl cytidine
  modified_base 43: mod_base = OTHER; note = 2'-O-methyl adenosine
  modified_base 44: mod_base = OTHER; note = 2'-O-methyl uridine
  modified_base 45: mod_base = OTHER; note = 2'-O-methyl uridine phosphorothioate
  modified_base 46: mod_base = OTHER; note = 2'-O-methyl uridine phosphorothioate
  modified_base 47: mod_base = OTHER; note = 2'-O-methyl cytidine phosphorothioate
  modified_base 48: mod_base = OTHER; note = 2'-O-methyl guanosine

SEQ ID NO: 326 - DNA, 48 bp, synthetic construct; identical to SEQ ID NO: 317
  source 1..48: mol_type = other DNA
  modified_base 1: mod_base = OTHER; note = 2'-O-methyl cytidine phosphorothioate
  modified_base 2: mod_base = OTHER; note = 2'-O-methyl uridine phosphorothioate
  modified_base 3: mod_base = OTHER; note = 2'-O-methyl guanosine phosphorothioate
  modified_base 4: mod_base = OTHER; note = 2'-O-methyl adenosine
  modified_base 5: mod_base = OTHER; note = 2'-O-methyl adenosine
  modified_base 6: mod_base = OTHER; note = 2'-O-methyl cytidine
  modified_base 7: mod_base = OTHER; note = Deoxythymidine phosphorothioate
  modified_base 8: mod_base = OTHER; note = 2'-O-methyl uridine
  modified_base 9: mod_base = OTHER; note = 2'-O-methyl guanosine
  modified_base 10: mod_base = OTHER; note = 2'-O-methyl uridine
  modified_base 11: mod_base = OTHER; note = 2'-O-methyl guanosine
  modified_base 12: mod_base = OTHER; note = 2'-fluoro guanosine
  modified_base 13: mod_base = OTHER; note = 2'-O-methyl cytidine
  modified_base 14: mod_base = OTHER; note = 2'-fluoro cytidine
  modified_base 15: mod_base = OTHER; note = 2'-O-methyl guanosine
  modified_base 16: mod_base = OTHER; note = 2'-fluoro uridine
  modified_base 17: mod_base = OTHER; note = 2'-O-methyl uridine
  modified_base 18: mod_base = OTHER; note = 2'-O-methyl uridine
  modified_base 22: mod_base = OTHER; note = 2'-O-methyl uridine
  modified_base 25: mod_base = OTHER; note = 2'-O-methyl guanosine
  modified_base 29: mod_base = OTHER; note = 2'-O-methyl uridine
  modified_base 30: mod_base = OTHER; note = 2'-O-methyl adenosine
  modified_base 31: mod_base = OTHER; note = 2'-O-methyl guanosine
  modified_base 32: mod_base = OTHER; note = 2'-O-methyl cytidine
  modified_base 38: mod_base = OTHER; note = 2'-O-methyl uridine
  modified_base 39: mod_base = OTHER; note = 2'-O-methyl uridine
  modified_base 40: mod_base = OTHER; note = 2'-O-methyl cytidine
  modified_base 41: mod_base = OTHER; note = 2'-O-methyl uridine
  modified_base 42: mod_base = OTHER; note = 2'-O-methyl cytidine
  modified_base 43: mod_base = OTHER; note = 2'-O-methyl adenosine
  modified_base 44: mod_base = OTHER; note = 2'-O-methyl uridine
  modified_base 45: mod_base = OTHER; note = 2'-O-methyl uridine phosphorothioate
  modified_base 46: mod_base = OTHER; note = 2'-O-methyl uridine phosphorothioate
  modified_base 47: mod_base = OTHER; note = 2'-O-methyl cytidine phosphorothioate
  modified_base 48: mod_base = OTHER; note = 2'-O-methyl guanosine
  misc_feature 1..6: note = RNA
  misc_feature 7: note = DNA
  misc_feature 8..48: note = RNA

SEQ ID NO: 327 - DNA, 48 bp, synthetic construct; identical to SEQ ID NO: 317
  source 1..48: mol_type = other DNA
  modified_base 1: mod_base = OTHER; note = 2'-O-methyl cytidine phosphorothioate
  modified_base 2: mod_base = OTHER; note = 2'-O-methyl uridine phosphorothioate
  modified_base 3: mod_base = OTHER; note = 2'-O-methyl guanosine phosphorothioate
  modified_base 4: mod_base = OTHER; note = 2'-O-methyl adenosine
  modified_base 5: mod_base = OTHER; note = 2'-O-methyl adenosine
  modified_base 6: mod_base = OTHER; note = 2'-O-methyl cytidine
  modified_base 7: mod_base = OTHER; note = Deoxythymidine phosphorothioate
  modified_base 8: mod_base = OTHER; note = 2'-O-methyl uridine
  modified_base 9: mod_base = OTHER; note = 2'-O-methyl guanosine
  modified_base 10: mod_base = OTHER; note = 2'-O-methyl uridine
  modified_base 11: mod_base = OTHER; note = 2'-O-methyl guanosine
  modified_base 12: mod_base = OTHER; note = 2'-fluoro guanosine
  modified_base 13: mod_base = OTHER; note = 2'-O-methyl cytidine
  modified_base 14: mod_base = OTHER; note = 2'-fluoro cytidine
  modified_base 15: mod_base = OTHER; note = 2'-O-methyl guanosine
  modified_base 16: mod_base = OTHER; note = 2'-fluoro uridine
  modified_base 17: mod_base = OTHER; note = 2'-O-methyl uridine
  modified_base 18: mod_base = OTHER; note = 2'-O-methyl uridine
  modified_base 20: mod_base = OTHER; note = 2'-fluoro cytidine
  modified_base 21: mod_base = OTHER; note = 2'-O-methyl guanosine
  modified_base 22: mod_base = OTHER; note = 2'-O-methyl uridine
  modified_base 23: mod_base = OTHER; note = 2'-O-methyl cytidine
  modified_base 24: mod_base = OTHER; note = 2'-O-methyl guanosine
  modified_base 25: mod_base = OTHER; note = 2'-O-methyl guanosine
  modified_base 29: mod_base = OTHER; note = 2'-O-methyl uridine
  modified_base 30: mod_base = OTHER; note = 2'-O-methyl adenosine
  modified_base 31: mod_base = OTHER; note = 2'-O-methyl guanosine
  modified_base 32: mod_base = OTHER; note = 2'-O-methyl cytidine
  modified_base 38: mod_base = OTHER; note = 2'-O-methyl uridine
  modified_base 39: mod_base = OTHER; note = 2'-O-methyl uridine
  modified_base 40: mod_base = OTHER; note = 2'-O-methyl cytidine
  modified_base 41: mod_base = OTHER; note = 2'-O-methyl uridine
  modified_base 42: mod_base = OTHER; note = 2'-O-methyl cytidine
  modified_base 43: mod_base = OTHER; note = 2'-O-methyl adenosine
  modified_base 44: mod_base = OTHER; note = 2'-O-methyl uridine
  modified_base 45: mod_base = OTHER; note = 2'-O-methyl uridine phosphorothioate
  modified_base 46: mod_base = OTHER; note = 2'-O-methyl uridine phosphorothioate
  modified_base 47: mod_base = OTHER; note = 2'-O-methyl cytidine phosphorothioate
  modified_base 48: mod_base = OTHER; note = 2'-O-methyl guanosine
  misc_feature 1..6: note = RNA
  misc_feature 7: note = DNA
  misc_feature 8..48: note = RNA

SEQ ID NO: 328 - DNA, 48 bp, synthetic construct; identical to SEQ ID NO: 317
  source 1..48: mol_type = other DNA
  modified_base 1: mod_base = OTHER; note = 2'-O-methyl cytidine phosphorothioate
  modified_base 2: mod_base = OTHER; note = 2'-O-methyl uridine phosphorothioate
  modified_base 3: mod_base = OTHER; note = 2'-O-methyl guanosine phosphorothioate
  modified_base 4: mod_base = OTHER; note = 2'-O-methyl adenosine
  modified_base 5: mod_base = OTHER; note = 2'-O-methyl adenosine
  modified_base 6: mod_base = OTHER; note = 2'-O-methyl cytidine
  modified_base 7: mod_base = OTHER; note = Deoxythymidine phosphorothioate
  modified_base 8: mod_base = OTHER; note = 2'-O-methyl uridine
  modified_base 9: mod_base = OTHER; note = 2'-O-methyl guanosine
  modified_base 10: mod_base = OTHER; note = 2'-O-methyl uridine
  modified_base 11: mod_base = OTHER; note = 2'-O-methyl guanosine
  modified_base 12: mod_base = OTHER; note = 2'-fluoro guanosine
  modified_base 13: mod_base = OTHER; note = 2'-O-methyl cytidine
  modified_base 14: mod_base = OTHER; note = 2'-fluoro cytidine
  modified_base 15: mod_base = OTHER; note = 2'-O-methyl guanosine
  modified_base 16: mod_base = OTHER; note = 2'-fluoro uridine
  modified_base 17: mod_base = OTHER; note = 2'-O-methyl uridine
  modified_base 18: mod_base = OTHER; note = 2'-O-methyl uridine
  modified_base 20: mod_base = OTHER; note = 2'-O-methyl cytidine
  modified_base 21: mod_base = OTHER; note = 2'-fluoro guanosine
  modified_base 22: mod_base = OTHER; note = 2'-O-methyl uridine
  modified_base 23: mod_base = OTHER; note = 2'-O-methyl cytidine
  modified_base 24: mod_base = OTHER; note = 2'-O-methyl guanosine
  modified_base 25: mod_base = OTHER; note = 2'-O-methyl guanosine
  modified_base 29: mod_base = OTHER; note = 2'-O-methyl uridine
  modified_base 30: mod_base = OTHER; note = 2'-O-methyl adenosine
  modified_base 31: mod_base = OTHER; note = 2'-O-methyl guanosine
  modified_base 32: mod_base = OTHER; note = 2'-O-methyl cytidine
  modified_base 38: mod_base = OTHER; note = 2'-O-methyl uridine
  modified_base 39: mod_base = OTHER; note = 2'-O-methyl uridine
  modified_base 40: mod_base = OTHER; note = 2'-O-methyl cytidine
  modified_base 41: mod_base = OTHER; note = 2'-O-methyl uridine
  modified_base 42: mod_base = OTHER; note = 2'-O-methyl cytidine
  modified_base 43: mod_base = OTHER; note = 2'-O-methyl adenosine
  modified_base 44: mod_base = OTHER; note = 2'-O-methyl uridine
  modified_base 45: mod_base = OTHER; note = 2'-O-methyl uridine phosphorothioate
  modified_base 46: mod_base = OTHER; note = 2'-O-methyl uridine phosphorothioate
  modified_base 47: mod_base = OTHER; note = 2'-O-methyl cytidine phosphorothioate
  modified_base 48: mod_base = OTHER; note = 2'-O-methyl guanosine
  misc_feature 1..6: note = RNA
  misc_feature 7: note = DNA
  misc_feature 8..48: note = RNA

SEQ ID NO: 329 - DNA, 48 bp, synthetic construct; identical to SEQ ID NO: 317
  source 1..48: mol_type = other DNA
  modified_base 1: mod_base = OTHER; note = 2'-O-methyl cytidine phosphorothioate
  modified_base 2: mod_base = OTHER; note = 2'-O-methyl uridine phosphorothioate
  modified_base 3: mod_base = OTHER; note = 2'-O-methyl guanosine phosphorothioate
  modified_base 4: mod_base = OTHER; note = 2'-O-methyl adenosine
  modified_base 5: mod_base = OTHER; note = 2'-O-methyl adenosine
  modified_base 6: mod_base = OTHER; note = 2'-O-methyl cytidine
  modified_base 7: mod_base = OTHER; note = Deoxythymidine phosphorothioate
  modified_base 8: mod_base = OTHER; note = 2'-O-methyl uridine
  modified_base 9: mod_base = OTHER; note = 2'-O-methyl guanosine
  modified_base 10: mod_base = OTHER; note = 2'-O-methyl uridine
  modified_base 11: mod_base = OTHER; note = 2'-O-methyl guanosine
  modified_base 12: mod_base = OTHER; note = 2'-O-methyl guanosine
  modified_base 13: mod_base = OTHER; note = 2'-O-methyl cytidine
  modified_base 14: mod_base = OTHER; note = 2'-fluoro cytidine
  modified_base 15: mod_base = OTHER; note = 2'-O-methyl guanosine
  modified_base 16: mod_base = OTHER; note = 2'-fluoro uridine
  modified_base 17: mod_base = OTHER; note = 2'-O-methyl uridine
  modified_base 18: mod_base = OTHER; note = 2'-O-methyl uridine
  modified_base 20: mod_base = OTHER; note = 2'-fluoro cytidine
  modified_base 21: mod_base = OTHER; note = 2'-O-methyl guanosine
  modified_base 22: mod_base = OTHER; note = 2'-O-methyl uridine
  modified_base 23: mod_base = OTHER; note = 2'-O-methyl cytidine
  modified_base 24: mod_base = OTHER; note = 2'-O-methyl guanosine
  modified_base 25: mod_base = OTHER; note = 2'-O-methyl guanosine
  modified_base 29: mod_base = OTHER; note = 2'-O-methyl uridine
  modified_base 30: mod_base = OTHER; note = 2'-O-methyl adenosine
  modified_base 31: mod_base = OTHER; note = 2'-O-methyl guanosine
  modified_base 32: mod_base = OTHER; note = 2'-O-methyl cytidine
  modified_base 38: mod_base = OTHER; note = 2'-O-methyl uridine
  modified_base 39: mod_base = OTHER; note = 2'-O-methyl uridine
  modified_base 40: mod_base = OTHER; note = 2'-O-methyl cytidine
  modified_base 41: mod_base = OTHER; note = 2'-O-methyl uridine
  modified_base 42: mod_base = OTHER; note = 2'-O-methyl cytidine
  modified_base 43: mod_base = OTHER; note = 2'-O-methyl adenosine
  modified_base 44: mod_base = OTHER; note = 2'-O-methyl uridine
  modified_base 45: mod_base = OTHER; note = 2'-O-methyl uridine phosphorothioate
  modified_base 46: mod_base = OTHER; note = 2'-O-methyl uridine phosphorothioate
  modified_base 47: mod_base = OTHER; note = 2'-O-methyl cytidine phosphorothioate
  modified_base 48: mod_base = OTHER; note = 2'-O-methyl guanosine
  misc_feature 1..6: note = RNA
  misc_feature 7: note = DNA
  misc_feature 8..48: note = RNA

SEQ ID NO: 330 - DNA, 48 bp, synthetic construct; identical to SEQ ID NO: 317
  source 1..48: mol_type = other DNA
  modified_base 1: mod_base = OTHER; note = 2'-O-methyl cytidine phosphorothioate
  modified_base 2: mod_base = OTHER; note = 2'-O-methyl uridine phosphorothioate
  modified_base 3: mod_base = OTHER; note = 2'-O-methyl guanosine phosphorothioate
  modified_base 4: mod_base = OTHER; note = 2'-O-methyl adenosine
  modified_base 5: mod_base = OTHER; note = 2'-O-methyl adenosine
  modified_base 6: mod_base = OTHER; note = 2'-O-methyl cytidine
  modified_base 7: mod_base = OTHER; note = Deoxythymidine phosphorothioate
  modified_base 8: mod_base = OTHER; note = 2'-O-methyl uridine
  modified_base 9: mod_base = OTHER; note = 2'-O-methyl guanosine
  modified_base 10: mod_base = OTHER; note = 2'-O-methyl uridine
  modified_base 11: mod_base = OTHER; note = 2'-O-methyl guanosine
  modified_base 12: mod_base = OTHER; note = 2'-O-methyl guanosine
  modified_base 13: mod_base = OTHER; note = 2'-O-methyl cytidine
  modified_base 14: mod_base = OTHER; note = 2'-fluoro cytidine
  modified_base 15: mod_base = OTHER; note = 2'-O-methyl guanosine
  modified_base 16: mod_base = OTHER; note = 2'-fluoro uridine
  modified_base 17: mod_base = OTHER; note = 2'-O-methyl uridine
  modified_base 18: mod_base = OTHER; note = 2'-O-methyl uridine
  modified_base 20: mod_base = OTHER; note = 2'-O-methyl cytidine
  modified_base 21: mod_base = OTHER; note = 2'-fluoro guanosine
  modified_base 22: mod_base = OTHER; note = 2'-O-methyl uridine
  modified_base 23: mod_base = OTHER; note = 2'-O-methyl cytidine
  modified_base 24: mod_base = OTHER; note = 2'-O-methyl guanosine
  modified_base 25: mod_base = OTHER; note = 2'-O-methyl guanosine
  modified_base 29: mod_base = OTHER; note = 2'-O-methyl uridine
  modified_base 30: mod_base = OTHER; note = 2'-O-methyl adenosine
  modified_base 31: mod_base = OTHER; note = 2'-O-methyl guanosine
  modified_base 32: mod_base = OTHER; note = 2'-O-methyl cytidine
  modified_base 38: mod_base = OTHER; note = 2'-O-methyl uridine
  modified_base 39: mod_base = OTHER; note = 2'-O-methyl uridine
  modified_base 40: mod_base = OTHER; note = 2'-O-methyl cytidine
  modified_base 41: mod_base = OTHER; note = 2'-O-methyl uridine
  modified_base 42: mod_base = OTHER; note = 2'-O-methyl cytidine
  modified_base 43: mod_base = OTHER; note = 2'-O-methyl adenosine
  modified_base 44: mod_base = OTHER; note = 2'-O-methyl uridine
  modified_base 45: mod_base = OTHER; note = 2'-O-methyl uridine phosphorothioate
  modified_base 46: mod_base = OTHER; note = 2'-O-methyl uridine phosphorothioate
  modified_base 47: mod_base = OTHER; note = 2'-O-methyl cytidine phosphorothioate
  modified_base 48: mod_base = OTHER; note = 2'-O-methyl guanosine
  misc_feature 1..6: note = RNA
  misc_feature 7: note = DNA
  misc_feature 8..48: note = RNA

SEQ ID NO: 331 - DNA, 48 bp, synthetic construct; identical to SEQ ID NO: 317
  source 1..48: mol_type = other DNA
  modified_base 1: mod_base = OTHER; note = 2'-O-methyl cytidine phosphorothioate
  modified_base 2: mod_base = OTHER; note = 2'-O-methyl uridine phosphorothioate
  modified_base 3: mod_base = OTHER; note = 2'-O-methyl guanosine phosphorothioate
  modified_base 4: mod_base = OTHER; note = 2'-O-methyl adenosine
  modified_base 5: mod_base = OTHER; note = 2'-O-methyl adenosine
  modified_base 6: mod_base = OTHER; note = 2'-O-methyl cytidine
  modified_base 7: mod_base = OTHER; note = Deoxythymidine phosphorothioate
  modified_base 8: mod_base = OTHER; note = 2'-O-methyl uridine
  modified_base 9: mod_base = OTHER; note = 2'-O-methyl guanosine
  modified_base 10: mod_base = OTHER; note = 2'-O-methyl uridine
  modified_base 11: mod_base = OTHER; note = 2'-O-methyl guanosine
  modified_base 12: mod_base = OTHER; note = 2'-fluoro guanosine
  modified_base 13: mod_base = OTHER; note = 2'-O-methyl cytidine
  modified_base 14: mod_base = OTHER; note = 2'-fluoro cytidine
  modified_base 15: mod_base = OTHER; note = 2'-O-methyl guanosine
  modified_base 16: mod_base = OTHER; note = 2'-fluoro uridine
  modified_base 17: mod_base = OTHER; note = 2'-O-methyl uridine
  modified_base 18: mod_base = OTHER; note = 2'-O-methyl uridine
  modified_base 19: mod_base = OTHER; note = Adenosine phosphorothioate
  modified_base 20: mod_base = OTHER; note = 2'-fluoro cytidine
  modified_base 21: mod_base = OTHER; note = 2'-O-methyl guanosine
  modified_base 22: mod_base = OTHER; note = 2'-O-methyl uridine
  modified_base 23: mod_base = OTHER; note = 2'-O-methyl cytidine
  modified_base 24: mod_base = OTHER; note = 2'-O-methyl guanosine
  modified_base 25: mod_base = OTHER; note = 2'-O-methyl guanosine
  modified_base 29: mod_base = OTHER; note = 2'-O-methyl uridine
  modified_base 30: mod_base = OTHER; note = 2'-O-methyl adenosine
  modified_base 31: mod_base = OTHER; note = 2'-O-methyl guanosine
  modified_base 32: mod_base = OTHER; note = 2'-O-methyl cytidine
  modified_base 38: mod_base = OTHER; note = 2'-O-methyl uridine
  modified_base 39: mod_base = OTHER; note = 2'-O-methyl uridine
  modified_base 40: mod_base = OTHER; note = 2'-O-methyl cytidine
  modified_base 41: mod_base = OTHER; note = 2'-O-methyl uridine
  modified_base 42: mod_base = OTHER; note = 2'-O-methyl cytidine
  modified_base 43: mod_base = OTHER; note = 2'-O-methyl adenosine
  modified_base 44: mod_base = OTHER; note = 2'-O-methyl uridine
  modified_base 45: mod_base = OTHER; note = 2'-O-methyl uridine phosphorothioate
  modified_base 46: mod_base = OTHER; note = 2'-O-methyl uridine phosphorothioate
  modified_base 47: mod_base = OTHER; note = 2'-O-methyl cytidine phosphorothioate
  modified_base 48: mod_base = OTHER; note = 2'-O-methyl guanosine
  misc_feature 1..6: note = RNA
  misc_feature 7: note = DNA
  misc_feature 8..48: note = RNA

SEQ ID NO: 332 - DNA, 48 bp, synthetic construct; identical to SEQ ID NO: 317
  source 1..48: mol_type = other DNA
  modified_base 1: mod_base = OTHER; note = 2'-O-methyl cytidine phosphorothioate
  modified_base 2: mod_base = OTHER; note = 2'-O-methyl uridine phosphorothioate
  modified_base 3: mod_base = OTHER; note = 2'-O-methyl guanosine phosphorothioate
  modified_base 4: mod_base = OTHER; note = 2'-O-methyl adenosine
  modified_base 5: mod_base = OTHER; note = 2'-O-methyl adenosine
  modified_base 6: mod_base = OTHER; note = 2'-O-methyl cytidine
  modified_base 7: mod_base = OTHER; note = Deoxythymidine phosphorothioate
  modified_base 8: mod_base = OTHER; note = 2'-O-methyl uridine
  modified_base 9: mod_base = OTHER; note = 2'-O-methyl guanosine
  modified_base 10: mod_base = OTHER; note = 2'-O-methyl uridine
  modified_base 11: mod_base = OTHER; note = 2'-O-methyl guanosine
  modified_base 12: mod_base = OTHER; note = 2'-fluoro guanosine
  modified_base 13: mod_base = OTHER; note = 2'-O-methyl cytidine
  modified_base 14: mod_base = OTHER; note = 2'-fluoro cytidine
  modified_base 15: mod_base = OTHER; note = 2'-O-methyl guanosine
  modified_base 16: mod_base = OTHER; note = 2'-fluoro uridine
  modified_base 17: mod_base = OTHER; note = 2'-O-methyl uridine
  modified_base 18: mod_base = OTHER; note = 2'-O-methyl uridine
  modified_base 19: mod_base = OTHER; note = Adenosine phosphorothioate
  modified_base 20: mod_base = OTHER; note = 2'-O-methyl cytidine
  modified_base 21: mod_base = OTHER; note = 2'-fluoro guanosine
  modified_base 22: mod_base = OTHER; note = 2'-O-methyl uridine
  modified_base 23: mod_base = OTHER; note = 2'-O-methyl cytidine
  modified_base 24: mod_base = OTHER; note = 2'-O-methyl guanosine
  modified_base 25: mod_base = OTHER; note = 2'-O-methyl guanosine
  modified_base 29: mod_base = OTHER; note = 2'-O-methyl uridine
  modified_base 30: mod_base = OTHER; note = 2'-O-methyl adenosine
  modified_base 31: mod_base = OTHER; note = 2'-O-methyl guanosine
  modified_base 32: mod_base = OTHER; note = 2'-O-methyl cytidine
  modified_base 38: mod_base = OTHER; note = 2'-O-methyl uridine
  modified_base 39: mod_base = OTHER; note = 2'-O-methyl uridine
  modified_base 40: mod_base = OTHER; note = 2'-O-methyl cytidine
  modified_base 41: mod_base = OTHER; note = 2'-O-methyl uridine
  modified_base 42: mod_base = OTHER; note = 2'-O-methyl cytidine
  modified_base 43: mod_base = OTHER; note = 2'-O-methyl adenosine
  modified_base 44: mod_base = OTHER; note = 2'-O-methyl uridine
  modified_base 45: mod_base = OTHER; note = 2'-O-methyl uridine phosphorothioate
  modified_base 46: mod_base = OTHER; note = 2'-O-methyl uridine phosphorothioate
  modified_base 47: mod_base = OTHER; note = 2'-O-methyl cytidine phosphorothioate
  modified_base 48: mod_base = OTHER; note = 2'-O-methyl guanosine
  misc_feature 1..6: note = RNA
  misc_feature 7: note = DNA
  misc_feature 8..48: note = RNA

SEQ ID NO: 333 - DNA, 48 bp, synthetic construct; identical to SEQ ID NO: 317
  source 1..48: mol_type = other DNA
  modified_base 1: mod_base = OTHER; note = 2'-O-methyl cytidine phosphorothioate
  modified_base 2: mod_base = OTHER; note = 2'-O-methyl uridine phosphorothioate
  modified_base 3: mod_base = OTHER; note = 2'-O-methyl guanosine phosphorothioate
  modified_base 4: mod_base = OTHER; note = 2'-O-methyl adenosine
  modified_base 5: mod_base = OTHER; note = 2'-O-methyl adenosine
  modified_base 6: mod_base = OTHER; note = 2'-O-methyl cytidine
  modified_base 7: mod_base = OTHER; note = Deoxythymidine phosphorothioate
  modified_base 8: mod_base = OTHER; note = 2'-O-methyl uridine
  modified_base 9: mod_base = OTHER; note = 2'-O-methyl guanosine
  modified_base 10: mod_base = OTHER; note = 2'-O-methyl uridine
  modified_base 11: mod_base = OTHER; note = 2'-O-methyl guanosine
  modified_base 12: mod_base = OTHER; note = 2'-O-methyl guanosine
  modified_base 13: mod_base = OTHER; note = 2'-O-methyl cytidine
  modified_base 14: mod_base = OTHER; note = 2'-fluoro cytidine
  modified_base 15: mod_base = OTHER; note = 2'-O-methyl guanosine
  modified_base 16: mod_base = OTHER; note = 2'-fluoro uridine
  modified_base 17: mod_base = OTHER; note = 2'-O-methyl uridine
  modified_base 18: mod_base = OTHER; note = 2'-O-methyl uridine
  modified_base 19: mod_base = OTHER; note = Adenosine phosphorothioate
  modified_base 20: mod_base = OTHER; note = 2'-fluoro cytidine
  modified_base 21: mod_base = OTHER; note = 2'-O-methyl guanosine
  modified_base 22: mod_base = OTHER; note = 2'-O-methyl uridine
  modified_base 23: mod_base = OTHER; note = 2'-O-methyl cytidine
  modified_base 24: mod_base = OTHER; note = 2'-O-methyl guanosine
  modified_base 25: mod_base = OTHER; note = 2'-O-methyl guanosine
  modified_base 29: mod_base = OTHER; note = 2'-O-methyl uridine
  modified_base 30: mod_base = OTHER; note = 2'-O-methyl adenosine
  modified_base 31: mod_base = OTHER; note = 2'-O-methyl guanosine
  modified_base 32: mod_base = OTHER; note = 2'-O-methyl cytidine
  modified_base 38: mod_base = OTHER; note = 2'-O-methyl uridine
  modified_base 39: mod_base = OTHER; note = 2'-O-methyl uridine
  modified_base 40: mod_base = OTHER; note = 2'-O-methyl cytidine
  modified_base 41: mod_base = OTHER; note = 2'-O-methyl uridine
  modified_base 42: mod_base = OTHER; note = 2'-O-methyl cytidine
  modified_base 43: mod_base = OTHER; note = 2'-O-methyl adenosine
  modified_base 44: mod_base = OTHER; note = 2'-O-methyl uridine
  modified_base 45: mod_base = OTHER; note = 2'-O-methyl uridine phosphorothioate
  modified_base 46: mod_base = OTHER; note = 2'-O-methyl uridine phosphorothioate
  modified_base 47: mod_base = OTHER; note = 2'-O-methyl cytidine phosphorothioate
  modified_base 48: mod_base = OTHER; note = 2'-O-methyl guanosine
  misc_feature 1..6: note = RNA
  misc_feature 7: note = DNA
  misc_feature 8..48: note = RNA

SEQ ID NO: 334 - DNA, 48 bp, synthetic construct; identical to SEQ ID NO: 317
  source 1..48: mol_type = other DNA
  modified_base 1: mod_base = OTHER; note = 2'-O-methyl cytidine phosphorothioate
  modified_base 2: mod_base = OTHER; note = 2'-O-methyl uridine phosphorothioate
  modified_base 3: mod_base = OTHER; note = 2'-O-methyl guanosine phosphorothioate
  modified_base 4: mod_base = OTHER; note = 2'-O-methyl adenosine
  modified_base 5: mod_base = OTHER; note = 2'-O-methyl adenosine
  modified_base 6: mod_base = OTHER; note = 2'-O-methyl cytidine
  modified_base 7: mod_base = OTHER; note = Deoxythymidine phosphorothioate
  modified_base 8: mod_base = OTHER; note = 2'-O-methyl uridine
  modified_base 9: mod_base = OTHER; note = 2'-O-methyl guanosine
  modified_base 10: mod_base = OTHER; note = 2'-O-methyl uridine
  modified_base 11: mod_base = OTHER; note = 2'-O-methyl guanosine
  modified_base 12: mod_base = OTHER; note = 2'-O-methyl guanosine
  modified_base 13: mod_base = OTHER; note = 2'-O-methyl cytidine
  modified_base 14: mod_base = OTHER; note = 2'-fluoro cytidine
  modified_base 15: mod_base = OTHER; note = 2'-O-methyl guanosine
  modified_base 16: mod_base = OTHER; note = 2'-fluoro uridine
  modified_base 17: mod_base = OTHER; note = 2'-O-methyl uridine
  modified_base 18: mod_base = OTHER; note = 2'-O-methyl uridine
  modified_base 19: mod_base = OTHER; note = Adenosine phosphorothioate
  modified_base 20: mod_base = OTHER; note = 2'-O-methyl cytidine
  modified_base 21: mod_base = OTHER; note = 2'-fluoro guanosine
  modified_base 22: mod_base = OTHER; note = 2'-O-methyl uridine
  modified_base 23: mod_base = OTHER; note = 2'-O-methyl cytidine
  modified_base 24: mod_base = OTHER; note = 2'-O-methyl guanosine
  modified_base 25: mod_base = OTHER; note = 2'-O-methyl guanosine
  modified_base 29: mod_base = OTHER; note = 2'-O-methyl uridine
  modified_base 30: mod_base = OTHER; note = 2'-O-methyl adenosine
  modified_base 31: mod_base = OTHER; note = 2'-O-methyl guanosine
  modified_base 32: mod_base = OTHER; note = 2'-O-methyl cytidine
  modified_base 38: mod_base = OTHER; note = 2'-O-methyl uridine
  modified_base 39: mod_base = OTHER; note = 2'-O-methyl uridine
  modified_base 40: mod_base = OTHER; note = 2'-O-methyl cytidine
  modified_base 41: mod_base = OTHER; note = 2'-O-methyl uridine
  modified_base 42: mod_base = OTHER; note = 2'-O-methyl cytidine
  modified_base 43: mod_base = OTHER; note = 2'-O-methyl adenosine
  modified_base 44: mod_base = OTHER; note = 2'-O-methyl uridine
  modified_base 45: mod_base = OTHER; note = 2'-O-methyl uridine phosphorothioate
  modified_base 46: mod_base = OTHER; note = 2'-O-methyl uridine phosphorothioate
  modified_base 47: mod_base = OTHER; note = 2'-O-methyl cytidine phosphorothioate
  modified_base 48: mod_base = OTHER; note = 2'-O-methyl guanosine
  misc_feature 1..6: note = RNA
  misc_feature 7: note = DNA
  misc_feature 8..48: note = RNA

SEQ ID NO: 335 - DNA, 48 bp, synthetic construct; identical to SEQ ID NO: 317
  source 1..48: mol_type = other DNA
  modified_base 1: mod_base = OTHER; note = 2'-O-methyl cytidine phosphorothioate
  modified_base 2: mod_base = OTHER; note = 2'-O-methyl uridine phosphorothioate
  modified_base 3: mod_base = OTHER; note = 2'-O-methyl guanosine phosphorothioate
  modified_base 4: mod_base = OTHER; note = 2'-O-methyl adenosine
  modified_base 5: mod_base = OTHER; note = 2'-O-methyl adenosine
  modified_base 6: mod_base = OTHER; note = 2'-O-methyl cytidine
  modified_base 7: mod_base = OTHER; note = Deoxythymidine phosphorothioate
  modified_base 8: mod_base = OTHER; note = 2'-O-methyl uridine
  modified_base 9: mod_base = OTHER; note = 2'-O-methyl guanosine
  modified_base 10: mod_base = OTHER; note = 2'-O-methyl uridine
  modified_base 11: mod_base = OTHER; note = 2'-O-methyl guanosine
  modified_base 12: mod_base = OTHER; note = 2'-fluoro guanosine
  modified_base 13: mod_base = OTHER; note = 2'-O-methyl cytidine
  modified_base 14: mod_base = OTHER; note = 2'-fluoro cytidine
  modified_base 15: mod_base = OTHER; note = 2'-O-methyl guanosine
  modified_base 16: mod_base = OTHER; note = 2'-fluoro uridine
  modified_base 17: mod_base = OTHER; note = 2'-O-methyl uridine
  modified_base 18: mod_base = OTHER; note = 2'-O-methyl uridine
  modified_base 19: mod_base = OTHER; note = 2'-O-methyl adenosine
  modified_base 20: mod_base = OTHER; note = 2'-fluoro cytidine
  modified_base 21: mod_base = OTHER; note = 2'-O-methyl guanosine
  modified_base 22: mod_base = OTHER; note = 2'-O-methyl uridine
  modified_base 23: mod_base = OTHER; note = 2'-O-methyl cytidine
  modified_base 24: mod_base = OTHER; note = 2'-O-methyl guanosine
  modified_base 25: mod_base = OTHER; note = 2'-O-methyl guanosine
  modified_base 29: mod_base = OTHER; note = 2'-O-methyl uridine
  modified_base 30: mod_base = OTHER; note = 2'-O-methyl adenosine
  modified_base 31: mod_base = OTHER; note = 2'-O-methyl guanosine
  modified_base 32: mod_base = OTHER; note = 2'-O-methyl cytidine
  modified_base 38: mod_base = OTHER; note = 2'-O-methyl uridine
  modified_base 39: mod_base = OTHER; note = 2'-O-methyl uridine
  modified_base 40: mod_base = OTHER; note = 2'-O-methyl cytidine
  modified_base 41: mod_base = OTHER; note = 2'-O-methyl uridine
  modified_base 42: mod_base = OTHER; note = 2'-O-methyl cytidine
  modified_base 43: mod_base = OTHER; note = 2'-O-methyl adenosine
  modified_base 44: mod_base = OTHER; note = 2'-O-methyl uridine
  modified_base 45: mod_base = OTHER; note = 2'-O-methyl uridine phosphorothioate
  modified_base 46: mod_base = OTHER; note = 2'-O-methyl uridine phosphorothioate
  modified_base 47: mod_base = OTHER; note = 2'-O-methyl cytidine phosphorothioate
  modified_base 48: mod_base = OTHER; note = 2'-O-methyl guanosine
  misc_feature 1..6: note = RNA
  misc_feature 7: note = DNA
  misc_feature 8..48: note = RNA

SEQ ID NO: 336 - DNA, 48 bp, synthetic construct; identical to SEQ ID NO: 317
  source 1..48: mol_type = other DNA
  modified_base 1: mod_base = OTHER; note = 2'-O-methyl cytidine phosphorothioate
  modified_base 2: mod_base = OTHER; note = 2'-O-methyl uridine phosphorothioate
  modified_base 3: mod_base = OTHER; note = 2'-O-methyl guanosine phosphorothioate
  modified_base 4: mod_base = OTHER; note = 2'-O-methyl adenosine
  modified_base 5: mod_base = OTHER; note = 2'-O-methyl adenosine
  modified_base 6: mod_base = OTHER; note = 2'-O-methyl cytidine
  modified_base 7: mod_base = OTHER; note = Deoxythymidine phosphorothioate
  modified_base 8: mod_base = OTHER; note = 2'-O-methyl uridine
  modified_base 9: mod_base = OTHER; note = 2'-O-methyl guanosine
  modified_base 10: mod_base = OTHER; note = 2'-O-methyl uridine
  modified_base 11: mod_base = OTHER; note = 2'-O-methyl guanosine
  modified_base 12: mod_base = OTHER; note = 2'-fluoro guanosine
  modified_base 13: mod_base = OTHER; note = 2'-O-methyl cytidine
  modified_base 14: mod_base = OTHER; note = 2'-fluoro cytidine
  modified_base 15: mod_base = OTHER; note = 2'-O-methyl guanosine
  modified_base 16: mod_base = OTHER; note = 2'-fluoro uridine
  modified_base 17: mod_base = OTHER; note = 2'-O-methyl uridine
  modified_base 18: mod_base = OTHER; note = 2'-O-methyl uridine
  modified_base 19: mod_base = OTHER; note = 2'-O-methyl adenosine
  modified_base 20: mod_base = OTHER; note = 2'-O-methyl cytidine
  modified_base 21: mod_base = OTHER; note = 2'-fluoro guanosine
  modified_base 22: mod_base = OTHER; note = 2'-O-methyl uridine
  modified_base 23: mod_base = OTHER; note = 2'-O-methyl cytidine
  modified_base 24: mod_base = OTHER; note = 2'-O-methyl guanosine
  modified_base 25: mod_base = OTHER; note = 2'-O-methyl guanosine
  modified_base 29: mod_base = OTHER; note = 2'-O-methyl uridine
  modified_base 30: mod_base = OTHER; note = 2'-O-methyl adenosine
  modified_base 31: mod_base = OTHER; note = 2'-O-methyl guanosine
  modified_base 32: mod_base = OTHER; note = 2'-O-methyl cytidine
  modified_base 38: mod_base = OTHER; note = 2'-O-methyl uridine
  modified_base 39: mod_base = OTHER; note = 2'-O-methyl uridine
  modified_base 40: mod_base = OTHER; note = 2'-O-methyl cytidine
  modified_base 41: mod_base = OTHER; note = 2'-O-methyl uridine
  modified_base 42: mod_base = OTHER; note = 2'-O-methyl cytidine
  modified_base 43: mod_base = OTHER; note = 2'-O-methyl adenosine
  modified_base 44: mod_base = OTHER; note = 2'-O-methyl uridine
  modified_base 45: mod_base = OTHER; note = 2'-O-methyl uridine phosphorothioate
  modified_base 46: mod_base = OTHER; note = 2'-O-methyl uridine phosphorothioate
  modified_base 47: mod_base = OTHER; note = 2'-O-methyl cytidine phosphorothioate
  modified_base 48: mod_base = OTHER; note = 2'-O-methyl guanosine
  misc_feature 1..6: note = RNA
  misc_feature 7: note = DNA
  misc_feature 8..48: note = RNA

SEQ ID NO: 337 - DNA, 48 bp, synthetic construct; identical to SEQ ID NO: 317
  source 1..48: mol_type = other DNA
  modified_base 1: mod_base = OTHER; note = 2'-O-methyl cytidine phosphorothioate
  modified_base 2: mod_base = OTHER; note = 2'-O-methyl uridine phosphorothioate
  modified_base 3: mod_base = OTHER; note = 2'-O-methyl guanosine phosphorothioate
  modified_base 4: mod_base = OTHER; note = 2'-O-methyl adenosine
  modified_base 5: mod_base = OTHER; note = 2'-O-methyl adenosine
  modified_base 6: mod_base = OTHER; note = 2'-O-methyl cytidine
  modified_base 7: mod_base = OTHER; note = Deoxythymidine phosphorothioate
  modified_base 8: mod_base = OTHER; note = 2'-O-methyl uridine
  modified_base 9: mod_base = OTHER; note = 2'-O-methyl guanosine
  modified_base 10: mod_base = OTHER; note = 2'-O-methyl uridine
  modified_base 11: mod_base = OTHER; note = 2'-O-methyl guanosine
  modified_base 12: mod_base = OTHER; note = 2'-O-methyl guanosine
  modified_base 13: mod_base = OTHER; note = 2'-O-methyl cytidine
  modified_base 14: mod_base = OTHER; note = 2'-fluoro cytidine
  modified_base 15: mod_base = OTHER; note = 2'-O-methyl guanosine
  modified_base 16: mod_base = OTHER; note = 2'-fluoro uridine
  modified_base 17: mod_base = OTHER; note = 2'-O-methyl uridine
  modified_base 18: mod_base = OTHER; note = 2'-O-methyl uridine
  modified_base 19: mod_base = OTHER; note = 2'-O-methyl adenosine
  modified_base 20: mod_base = OTHER; note = 2'-fluoro cytidine
  modified_base 21: mod_base = OTHER; note = 2'-O-methyl guanosine
  modified_base 22: mod_base = OTHER; note = 2'-O-methyl uridine
  modified_base 23: mod_base = OTHER; note = 2'-O-methyl cytidine
  modified_base 24: mod_base = OTHER; note = 2'-O-methyl guanosine
  modified_base 25: mod_base = OTHER; note = 2'-O-methyl guanosine
  modified_base 29: mod_base = OTHER; note = 2'-O-methyl uridine
  modified_base 30: mod_base = OTHER; note = 2'-O-methyl adenosine
  modified_base 31: mod_base = OTHER; note = 2'-O-methyl guanosine
  modified_base 32: mod_base = OTHER; note = 2'-O-methyl cytidine
  modified_base 38: mod_base = OTHER; note = 2'-O-methyl uridine
  modified_base 39: mod_base = OTHER; note = 2'-O-methyl uridine
  modified_base 40: mod_base = OTHER; note = 2'-O-methyl cytidine
  modified_base 41: mod_base = OTHER; note = 2'-O-methyl uridine
  modified_base 42: mod_base = OTHER; note = 2'-O-methyl cytidine
  modified_base 43: mod_base = OTHER; note = 2'-O-methyl adenosine
  modified_base 44: mod_base = OTHER; note = 2'-O-methyl uridine
  modified_base 45: mod_base = OTHER; note = 2'-O-methyl uridine phosphorothioate
  modified_base 46: mod_base = OTHER; note = 2'-O-methyl uridine phosphorothioate
  modified_base 47: mod_base = OTHER; note = 2'-O-methyl cytidine phosphorothioate
  modified_base 48: mod_base = OTHER; note = 2'-O-methyl guanosine
  misc_feature 1..6: note = RNA
  misc_feature 7: note = DNA
  misc_feature 8..48: note = RNA

SEQ ID NO: 338 - DNA, 48 bp, synthetic construct; identical to SEQ ID NO: 317
  source 1..48: mol_type = other DNA
  modified_base 1: mod_base = OTHER; note = 2'-O-methyl cytidine phosphorothioate
  modified_base 2: mod_base = OTHER; note = 2'-O-methyl uridine phosphorothioate
  modified_base 3: mod_base = OTHER; note = 2'-O-methyl guanosine phosphorothioate
  modified_base 4: mod_base = OTHER; note = 2'-O-methyl adenosine
  modified_base 5: mod_base = OTHER; note = 2'-O-methyl adenosine
  modified_base 6: mod_base = OTHER; note = 2'-O-methyl cytidine
  modified_base 7: mod_base = OTHER; note = Deoxythymidine phosphorothioate
  modified_base 8: mod_base = OTHER; note = 2'-O-methyl uridine
  modified_base 9: mod_base = OTHER; note = 2'-O-methyl guanosine
  modified_base 10: mod_base = OTHER; note = 2'-O-methyl uridine
  modified_base 11: mod_base = OTHER; note = 2'-O-methyl guanosine
  modified_base 12: mod_base = OTHER; note = 2'-O-methyl guanosine
  modified_base 13: mod_base = OTHER; note = 2'-O-methyl cytidine
  modified_base 14: mod_base = OTHER; note = 2'-fluoro cytidine
  modified_base 15: mod_base = OTHER; note = 2'-O-methyl guanosine
  modified_base 16: mod_base = OTHER; note = 2'-fluoro uridine
  modified_base 17: mod_base = OTHER; note = 2'-O-methyl uridine
  modified_base 18: mod_base = OTHER; note = 2'-O-methyl uridine
  modified_base 19: mod_base = OTHER; note = 2'-O-methyl adenosine
  modified_base 20: mod_base = OTHER; note = 2'-O-methyl cytidine
  modified_base 21: mod_base = OTHER; note = 2'-fluoro guanosine
  modified_base 22: mod_base = OTHER; note = 2'-O-methyl uridine
  modified_base 23: mod_base = OTHER; note = 2'-O-methyl cytidine
  modified_base 24: mod_base = OTHER; note = 2'-O-methyl guanosine
  modified_base 25: mod_base = OTHER; note = 2'-O-methyl guanosine
  modified_base 29: mod_base = OTHER; note = 2'-O-methyl uridine
  modified_base 30: mod_base = OTHER; note = 2'-O-methyl adenosine
  modified_base 31: mod_base = OTHER; note = 2'-O-methyl guanosine
  modified_base 32: mod_base = OTHER; note = 2'-O-methyl cytidine
  modified_base 38: mod_base = OTHER; note = 2'-O-methyl uridine
  modified_base 39: mod_base = OTHER; note = 2'-O-methyl uridine
  modified_base 40: mod_base = OTHER; note = 2'-O-methyl cytidine
  modified_base 41: mod_base = OTHER; note = 2'-O-methyl uridine
  modified_base 42: mod_base = OTHER; note = 2'-O-methyl cytidine
  modified_base 43: mod_base = OTHER; note = 2'-O-methyl adenosine
  modified_base 44: mod_base = OTHER; note = 2'-O-methyl uridine
  modified_base 45: mod_base = OTHER; note = 2'-O-methyl uridine phosphorothioate
  modified_base 46: mod_base = OTHER; note = 2'-O-methyl uridine phosphorothioate
  modified_base 47: mod_base = OTHER; note = 2'-O-methyl cytidine phosphorothioate
  modified_base 48: mod_base = OTHER; note = 2'-O-methyl guanosine
  misc_feature 1..6: note = RNA
  misc_feature 7: note = DNA
  misc_feature 8..48: note = RNA

SEQ ID NO: 339 - DNA, 48 bp, synthetic construct; identical to SEQ ID NO: 317
  source 1..48: mol_type = other DNA
  modified_base 1: mod_base = OTHER; note = 2'-O-methyl cytidine phosphorothioate
  modified_base 2: mod_base = OTHER; note = 2'-O-methyl uridine phosphorothioate
  modified_base 3: mod_base = OTHER; note = 2'-O-methyl guanosine phosphorothioate
  modified_base 4: mod_base = OTHER; note = 2'-O-methyl adenosine
  modified_base 5: mod_base = OTHER; note = 2'-O-methyl adenosine
  modified_base 6: mod_base = OTHER; note = 2'-O-methyl cytidine
  modified_base 7: mod_base = OTHER; note = Deoxythymidine phosphorothioate
  modified_base 8: mod_base = OTHER; note = 2'-O-methyl uridine
  modified_base 9: mod_base = OTHER; note = 2'-O-methyl guanosine
  modified_base 10: mod_base = OTHER; note = 2'-O-methyl uridine
  modified_base 11: mod_base = OTHER; note = 2'-O-methyl guanosine
  modified_base 12: mod_base = OTHER; note = 2'-fluoro guanosine
  modified_base 13: mod_base = OTHER; note = 2'-O-methyl cytidine
  modified_base 14: mod_base = OTHER; note = 2'-fluoro cytidine
  modified_base 15: mod_base = OTHER; note = 2'-O-methyl guanosine
  modified_base 16: mod_base = OTHER; note = 2'-fluoro uridine
  modified_base 17: mod_base = OTHER; note = 2'-O-methyl uridine
  modified_base 18: mod_base = OTHER; note = 2'-O-methyl uridine
  modified_base 19: mod_base = OTHER; note = 2'-fluoro adenosine
  modified_base 20: mod_base = OTHER; note = 2'-fluoro cytidine
  modified_base 21: mod_base = OTHER; note = 2'-O-methyl guanosine
  modified_base 22: mod_base = OTHER; note = 2'-O-methyl uridine
  modified_base 23: mod_base = OTHER; note = 2'-O-methyl cytidine
  modified_base 24: mod_base = OTHER; note = 2'-O-methyl guanosine
  modified_base 25: mod_base = OTHER; note = 2'-O-methyl guanosine
  modified_base 29: mod_base = OTHER; note = 2'-O-methyl uridine
  modified_base 30: mod_base = OTHER; note = 2'-O-methyl adenosine
  modified_base 31: mod_base = OTHER; note = 2'-O-methyl guanosine
  modified_base 32: mod_base = OTHER; note = 2'-O-methyl cytidine
  modified_base 38: mod_base = OTHER; note = 2'-O-methyl uridine
  modified_base 39: mod_base = OTHER; note = 2'-O-methyl uridine
  modified_base 40: mod_base = OTHER; note = 2'-O-methyl cytidine
  modified_base 41: mod_base = OTHER; note = 2'-O-methyl uridine
  modified_base 42: mod_base = OTHER; note = 2'-O-methyl cytidine
  modified_base 43: mod_base = OTHER; note = 2'-O-methyl adenosine
  modified_base 44: mod_base = OTHER; note = 2'-O-methyl uridine
  modified_base 45: mod_base = OTHER; note = 2'-O-methyl uridine phosphorothioate
  modified_base 46: mod_base = OTHER; note = 2'-O-methyl uridine phosphorothioate
  modified_base 47: mod_base = OTHER; note = 2'-O-methyl cytidine phosphorothioate
  modified_base 48: mod_base = OTHER; note = 2'-O-methyl guanosine
  misc_feature 1..6: note = RNA
  misc_feature 7: note = DNA
  misc_feature 8..48: note = RNA

SEQ ID NO: 340 - DNA, 48 bp, synthetic construct; identical to SEQ ID NO: 317
  source 1..48: mol_type = other DNA
  modified_base 1: mod_base = OTHER; note = 2'-O-methyl cytidine phosphorothioate
  modified_base 2: mod_base = OTHER; note = 2'-O-methyl uridine phosphorothioate
  modified_base 3: mod_base = OTHER; note = 2'-O-methyl guanosine phosphorothioate
  modified_base 4: mod_base = OTHER; note = 2'-O-methyl adenosine
  modified_base 5: mod_base = OTHER; note = 2'-O-methyl adenosine
  modified_base 6: mod_base = OTHER; note = 2'-O-methyl cytidine
  modified_base 7: mod_base = OTHER; note = Deoxythymidine phosphorothioate
  modified_base 8: mod_base = OTHER; note = 2'-O-methyl uridine
  modified_base 9: mod_base = OTHER; note = 2'-O-methyl guanosine
  modified_base 10: mod_base = OTHER; note = 2'-O-methyl uridine
  modified_base 11: mod_base = OTHER; note = 2'-O-methyl guanosine
  modified_base 12: mod_base = OTHER; note = 2'-fluoro guanosine
  modified_base 13: mod_base = OTHER; note = 2'-O-methyl cytidine
  modified_base 14: mod_base = OTHER; note = 2'-fluoro cytidine
  modified_base 15: mod_base = OTHER; note = 2'-O-methyl guanosine
  modified_base 16: mod_base = OTHER; note = 2'-fluoro uridine
  modified_base 17: mod_base = OTHER; note = 2'-O-methyl uridine
  modified_base 18: mod_base = OTHER; note = 2'-O-methyl uridine
  modified_base 19: mod_base = OTHER; note = 2'-fluoro adenosine
  modified_base 20: mod_base = OTHER; note = 2'-O-methyl cytidine
  modified_base 21: mod_base = OTHER; note = 2'-fluoro guanosine
  modified_base 22: mod_base = OTHER; note = 2'-O-methyl uridine
  modified_base 23: mod_base = OTHER; note = 2'-O-methyl cytidine
  modified_base 24: mod_base = OTHER; note = 2'-O-methyl guanosine
  modified_base 25: mod_base = OTHER; note = 2'-O-methyl guanosine
  modified_base 29: mod_base = OTHER; note = 2'-O-methyl uridine
  modified_base 30: mod_base = OTHER; note = 2'-O-methyl adenosine
  modified_base 31: mod_base = OTHER; note = 2'-O-methyl guanosine
  modified_base 32: mod_base = OTHER; note = 2'-O-methyl cytidine
  modified_base 38: mod_base = OTHER; note = 2'-O-methyl uridine
  modified_base 39: mod_base = OTHER; note = 2'-O-methyl uridine
  modified_base 40: mod_base = OTHER; note = 2'-O-methyl cytidine
  modified_base 41: mod_base = OTHER; note = 2'-O-methyl uridine
  modified_base 42: mod_base = OTHER; note = 2'-O-methyl cytidine
  modified_base 43: mod_base = OTHER; note = 2'-O-methyl adenosine
  modified_base 44: mod_base = OTHER; note = 2'-O-methyl uridine
  modified_base 45: mod_base = OTHER; note = 2'-O-methyl uridine phosphorothioate
  modified_base 46: mod_base = OTHER; note = 2'-O-methyl uridine phosphorothioate
  modified_base 47: mod_base = OTHER; note = 2'-O-methyl cytidine phosphorothioate
  modified_base 48: mod_base = OTHER; note = 2'-O-methyl guanosine
  misc_feature 1..6: note = RNA
  misc_feature 7: note = DNA
  misc_feature 8..48: note = RNA

SEQ ID NO: 341 - DNA, 48 bp, synthetic construct; identical to SEQ ID NO: 317
  source 1..48: mol_type = other DNA
  modified_base 1: mod_base = OTHER; note = 2'-O-methyl cytidine phosphorothioate
  modified_base 2: mod_base = OTHER; note = 2'-O-methyl uridine phosphorothioate
  modified_base 3: mod_base = OTHER; note = 2'-O-methyl guanosine phosphorothioate
  modified_base 4: mod_base = OTHER; note = 2'-O-methyl adenosine
  modified_base 5: mod_base = OTHER; note = 2'-O-methyl adenosine
  modified_base 6: mod_base = OTHER; note = 2'-O-methyl cytidine
  modified_base 7: mod_base = OTHER; note = Deoxythymidine phosphorothioate
  modified_base 8: mod_base = OTHER; note = 2'-O-methyl uridine
  modified_base 9: mod_base = OTHER; note = 2'-O-methyl guanosine
  modified_base 10: mod_base = OTHER; note = 2'-O-methyl uridine
  modified_base 11: mod_base = OTHER; note = 2'-O-methyl guanosine
  modified_base 12: mod_base = OTHER; note = 2'-O-methyl guanosine
  modified_base 13: mod_base = OTHER; note = 2'-O-methyl cytidine
  modified_base 14: mod_base = OTHER; note = 2'-fluoro cytidine
  modified_base 15: mod_base = OTHER; note = 2'-O-methyl guanosine
  modified_base 16: mod_base = OTHER; note = 2'-fluoro uridine
  modified_base 17: mod_base = OTHER; note = 2'-O-methyl uridine
  modified_base 18: mod_base = OTHER; note = 2'-O-methyl uridine
  modified_base 19: mod_base = OTHER; note = 2'-fluoro adenosine
  modified_base 20: mod_base = OTHER; note = 2'-fluoro cytidine
  modified_base 21: mod_base = OTHER; note = 2'-O-methyl guanosine
  modified_base 22: mod_base = OTHER; note = 2'-O-methyl uridine
  modified_base 23: mod_base = OTHER; note = 2'-O-methyl cytidine
  modified_base 24: mod_base = OTHER; note = 2'-O-methyl guanosine
  modified_base 25: mod_base = OTHER; note = 2'-O-methyl guanosine
  modified_base 29: mod_base = OTHER; note = 2'-O-methyl uridine
  modified_base 30: mod_base = OTHER; note = 2'-O-methyl adenosine
  modified_base 31: mod_base = OTHER; note = 2'-O-methyl guanosine
  modified_base 32: mod_base = OTHER; note = 2'-O-methyl cytidine
  modified_base 38: mod_base = OTHER; note = 2'-O-methyl uridine
  modified_base 39: mod_base = OTHER; note = 2'-O-methyl uridine
  modified_base 40: mod_base = OTHER; note = 2'-O-methyl cytidine
  modified_base 41: mod_base = OTHER; note = 2'-O-methyl uridine
  modified_base 42: mod_base = OTHER; note = 2'-O-methyl cytidine
  modified_base 43: mod_base = OTHER; note = 2'-O-methyl adenosine
  modified_base 44: mod_base = OTHER; note = 2'-O-methyl uridine
  modified_base 45: mod_base = OTHER; note = 2'-O-methyl uridine phosphorothioate
  modified_base 46: mod_base = OTHER; note = 2'-O-methyl uridine phosphorothioate
  modified_base 47: mod_base = OTHER; note = 2'-O-methyl cytidine phosphorothioate
  modified_base 48: mod_base = OTHER; note = 2'-O-methyl guanosine
  misc_feature 1..6: note = RNA
  misc_feature 7: note = DNA
  misc_feature 8..48: note = RNA

SEQ ID NO: 342 - DNA, 48 bp, synthetic construct; identical to SEQ ID NO: 317
  source 1..48: mol_type = other DNA
  modified_base 1: mod_base = OTHER; note = 2'-O-methyl cytidine phosphorothioate
  modified_base 2: mod_base = OTHER; note = 2'-O-methyl uridine phosphorothioate
  modified_base 3: mod_base = OTHER; note = 2'-O-methyl guanosine phosphorothioate
  modified_base 4: mod_base = OTHER; note = 2'-O-methyl adenosine
  modified_base 5: mod_base = OTHER; note = 2'-O-methyl adenosine
  modified_base 6: mod_base = OTHER; note = 2'-O-methyl cytidine
  modified_base 7: mod_base = OTHER; note = Deoxythymidine phosphorothioate
  modified_base 8: mod_base = OTHER; note = 2'-O-methyl uridine
  modified_base 9: mod_base = OTHER; note = 2'-O-methyl guanosine
  modified_base 10: mod_base = OTHER; note = 2'-O-methyl uridine
  modified_base 11: mod_base = OTHER; note = 2'-O-methyl guanosine
  modified_base 12: mod_base = OTHER; note = 2'-O-methyl guanosine
  modified_base 13: mod_base = OTHER; note = 2'-O-methyl cytidine
  modified_base 14: mod_base = OTHER; note = 2'-fluoro cytidine
  modified_base 15: mod_base = OTHER; note = 2'-O-methyl guanosine
  modified_base 16: mod_base = OTHER; note = 2'-fluoro uridine
  modified_base 17: mod_base = OTHER; note = 2'-O-methyl uridine
  modified_base 18: mod_base = OTHER; note = 2'-O-methyl uridine
  modified_base 19: mod_base = OTHER; note = 2'-fluoro adenosine
  modified_base 20: mod_base = OTHER; note = 2'-O-methyl cytidine
  modified_base 21: mod_base = OTHER; note = 2'-fluoro guanosine
  modified_base 22: mod_base = OTHER; note = 2'-O-methyl uridine
  modified_base 23: mod_base = OTHER; note = 2'-O-methyl cytidine
  modified_base 24: mod_base = OTHER; note = 2'-O-methyl guanosine
  modified_base 25: mod_base = OTHER; note = 2'-O-methyl guanosine
  modified_base 29: mod_base = OTHER; note = 2'-O-methyl uridine
  modified_base 30: mod_base = OTHER; note = 2'-O-methyl adenosine
  modified_base 31: mod_base = OTHER; note = 2'-O-methyl guanosine
  modified_base 32: mod_base = OTHER; note = 2'-O-methyl cytidine
  modified_base 38: mod_base = OTHER; note = 2'-O-methyl uridine
  modified_base 39: mod_base = OTHER; note = 2'-O-methyl uridine
  modified_base 40: mod_base = OTHER; note = 2'-O-methyl cytidine
  modified_base 41: mod_base = OTHER; note = 2'-O-methyl uridine
  modified_base 42: mod_base = OTHER; note = 2'-O-methyl cytidine
  modified_base 43: mod_base = OTHER; note = 2'-O-methyl adenosine
  modified_base 44: mod_base = OTHER; note = 2'-O-methyl uridine
  modified_base 45: mod_base = OTHER; note = 2'-O-methyl uridine phosphorothioate
  modified_base 46: mod_base = OTHER; note = 2'-O-methyl uridine phosphorothioate
  modified_base 47: mod_base = OTHER; note = 2'-O-methyl cytidine phosphorothioate
  modified_base 48: mod_base = OTHER; note = 2'-O-methyl guanosine
  misc_feature 1..6: note = RNA
  misc_feature 7: note = DNA
  misc_feature 8..48: note = RNA

SEQ ID NO: 343 - DNA, 48 bp, synthetic construct; identical to SEQ ID NO: 317
  source 1..48: mol_type = other DNA
  modified_base 1: mod_base = OTHER; note = 2'-O-methyl cytidine phosphorothioate
  modified_base 2: mod_base = OTHER; note = 2'-O-methyl uridine phosphorothioate
  modified_base 3: mod_base = OTHER; note = 2'-O-methyl guanosine phosphorothioate
  modified_base 4: mod_base = OTHER; note = 2'-O-methyl adenosine
  modified_base 5: mod_base = OTHER; note = 2'-O-methyl adenosine
  modified_base 6: mod_base = OTHER; note = 2'-O-methyl cytidine
  modified_base 7: mod_base = OTHER; note = Deoxythymidine phosphorothioate
  modified_base 8: mod_base = OTHER; note = 2'-O-methyl uridine
  modified_base 9: mod_base = OTHER; note = 2'-O-methyl guanosine
  modified_base 10: mod_base = OTHER; note = 2'-O-methyl uridine
  modified_base 11: mod_base = OTHER; note = 2'-O-methyl guanosine
  modified_base 12: mod_base = OTHER; note = 2'-O-methyl guanosine
  modified_base 13: mod_base = OTHER; note = 2'-O-methyl cytidine
  modified_base 14: mod_base = OTHER; note = 2'-fluoro cytidine
  modified_base 15: mod_base = OTHER; note = 2'-O-methyl guanosine
  modified_base 16: mod_base = OTHER; note = 2'-fluoro uridine
  modified_base 17: mod_base = OTHER; note = 2'-O-methyl uridine
  modified_base 18: mod_base = OTHER; note = 2'-O-methyl uridine
  modified_base 22: mod_base = OTHER; note = 2'-O-methyl uridine
  modified_base 25: mod_base = OTHER; note = 2'-O-methyl guanosine
  modified_base 28: mod_base = OTHER; note = 2'-O-methyl guanosine
  modified_base 29: mod_base = OTHER; note = 2'-O-methyl uridine
  modified_base 30: mod_base = OTHER; note = 2'-O-methyl adenosine
  modified_base 31: mod_base = OTHER; note = 2'-O-methyl guanosine
  modified_base 32: mod_base = OTHER; note = 2'-O-methyl cytidine
  modified_base 35: mod_base = OTHER; note = 2'-O-methyl cytidine
  modified_base 38: mod_base = OTHER; note = 2'-O-methyl uridine
  modified_base 39: mod_base = OTHER; note = 2'-O-methyl uridine
  modified_base 40: mod_base = OTHER; note = 2'-O-methyl cytidine
  modified_base 41: mod_base = OTHER; note = 2'-O-methyl uridine
  modified_base 42: mod_base = OTHER; note = 2'-O-methyl cytidine
  modified_base 43: mod_base = OTHER; note = 2'-O-methyl adenosine
  modified_base 44: mod_base = OTHER; note = 2'-O-methyl uridine
  modified_base 45: mod_base = OTHER; note = 2'-O-methyl uridine phosphorothioate
  modified_base 46: mod_base = OTHER; note = 2'-O-methyl uridine phosphorothioate
  modified_base 47: mod_base = OTHER; note = 2'-O-methyl cytidine phosphorothioate
  modified_base 48: mod_base = OTHER; note = 2'-O-methyl guanosine
  misc_feature 1..6: note = RNA
  misc_feature 7: note = DNA
  misc_feature 8..48: note = RNA

SEQ ID NO: 344 - DNA, 48 bp, synthetic construct; identical to SEQ ID NO: 317
  source 1..48: mol_type = other DNA
  modified_base 1: mod_base = OTHER; note = 2'-O-methyl cytidine phosphorothioate
  modified_base 2: mod_base = OTHER; note = 2'-O-methyl uridine phosphorothioate
  modified_base 3: mod_base = OTHER; note = 2'-O-methyl guanosine phosphorothioate
  modified_base 4: mod_base = OTHER; note = 2'-O-methyl adenosine
  modified_base 5: mod_base = OTHER; note = 2'-O-methyl adenosine
  modified_base 6: mod_base = OTHER; note = 2'-O-methyl cytidine
  modified_base 7: mod_base = OTHER; note = Deoxythymidine phosphorothioate
  modified_base 8: mod_base = OTHER; note = 2'-O-methyl uridine
  modified_base 9: mod_base = OTHER; note = 2'-O-methyl guanosine
  modified_base 10: mod_base = OTHER; note = 2'-O-methyl uridine
  modified_base 11: mod_base = OTHER; note = 2'-O-methyl guanosine
  modified_base 12: mod_base = OTHER; note = 2'-O-methyl guanosine
  modified_base 13: mod_base = OTHER; note = 2'-O-methyl cytidine
  modified_base 14: mod_base = OTHER; note = 2'-fluoro cytidine
  modified_base 15: mod_base = OTHER; note = 2'-O-methyl guanosine
  modified_base 16: mod_base = OTHER; note = 2'-fluoro uridine
  modified_base 17: mod_base = OTHER; note = 2'-O-methyl uridine
  modified_base 18: mod_base = OTHER; note = 2'-O-methyl uridine
  modified_base 22: mod_base = OTHER; note = 2'-O-methyl uridine
  modified_base 25: mod_base = OTHER; note = 2'-O-methyl guanosine
  modified_base 28: mod_base = OTHER; note = 2'-O-methyl guanosine
  modified_base 29: mod_base = OTHER; note = 2'-O-methyl uridine
  modified_base 30: mod_base = OTHER; note = 2'-O-methyl adenosine
  modified_base 31: mod_base = OTHER; note = 2'-O-methyl guanosine
  modified_base 32: mod_base = OTHER; note = 2'-O-methyl cytidine
  modified_base 36: mod_base = OTHER; note = 2'-O-methyl cytidine
  modified_base 38: mod_base = OTHER; note = 2'-O-methyl uridine
  modified_base 39: mod_base = OTHER; note = 2'-O-methyl uridine
  modified_base 40: mod_base = OTHER; note = 2'-O-methyl cytidine
  modified_base 41: mod_base = OTHER; note = 2'-O-methyl uridine
  modified_base 42: mod_base = OTHER; note = 2'-O-methyl cytidine
  modified_base 43: mod_base = OTHER; note = 2'-O-methyl adenosine
  modified_base 44: mod_base = OTHER; note = 2'-O-methyl uridine
  modified_base 45: mod_base = OTHER; note = 2'-O-methyl uridine phosphorothioate
  modified_base 46: mod_base = OTHER; note = 2'-O-methyl uridine phosphorothioate
  modified_base 47: mod_base = OTHER; note = 2'-O-methyl cytidine phosphorothioate
  modified_base 48: mod_base = OTHER; note = 2'-O-methyl guanosine
  misc_feature 1..6: note = RNA
  misc_feature 7: note = DNA
  misc_feature 8..48: note = RNA

SEQ ID NO: 345 - DNA, 48 bp, synthetic construct; identical to SEQ ID NO: 317
  source 1..48: mol_type = other DNA
  modified_base 1: mod_base = OTHER; note = 2'-O-methyl cytidine phosphorothioate
  modified_base 2: mod_base = OTHER; note = 2'-O-methyl uridine phosphorothioate
  modified_base 3: mod_base = OTHER; note = 2'-O-methyl guanosine phosphorothioate
  modified_base 4: mod_base = OTHER; note = 2'-O-methyl adenosine
  modified_base 5: mod_base = OTHER; note = 2'-O-methyl adenosine
  modified_base 6: mod_base = OTHER; note = 2'-O-methyl cytidine
  modified_base 7: mod_base = OTHER; note = Deoxythymidine phosphorothioate
  modified_base 8: mod_base = OTHER; note = 2'-O-methyl uridine
  modified_base 9: mod_base = OTHER; note = 2'-O-methyl guanosine
  modified_base 10: mod_base = OTHER; note = 2'-O-methyl uridine
  modified_base 11: mod_base = OTHER; note = 2'-O-methyl guanosine
  modified_base 12: mod_base = OTHER; note = 2'-O-methyl guanosine
  modified_base 13: mod_base = OTHER; note = 2'-O-methyl cytidine
  modified_base 14: mod_base = OTHER; note = 2'-fluoro cytidine
  modified_base 15: mod_base = OTHER; note = 2'-O-methyl guanosine
  modified_base 16: mod_base = OTHER; note = 2'-fluoro uridine
  modified_base 17: mod_base = OTHER; note = 2'-O-methyl uridine
  modified_base 18: mod_base = OTHER; note = 2'-O-methyl uridine
  modified_base 22: mod_base = OTHER; note = 2'-O-methyl uridine
  modified_base 25: mod_base = OTHER; note = 2'-O-methyl guanosine
  modified_base 29: mod_base = OTHER; note = 2'-O-methyl uridine
  modified_base 30: mod_base = OTHER; note = 2'-O-methyl adenosine
  modified_base 31: mod_base = OTHER; note = 2'-O-methyl guanosine
  modified_base 32: mod_base = OTHER; note = 2'-O-methyl cytidine
  modified_base 35: mod_base = OTHER; note = 2'-O-methyl cytidine
  modified_base 36: mod_base = OTHER; note = 2'-O-methyl cytidine
  modified_base 38: mod_base = OTHER; note = 2'-O-methyl uridine
  modified_base 39: mod_base = OTHER; note = 2'-O-methyl uridine
  modified_base 40: mod_base = OTHER; note = 2'-O-methyl cytidine
  modified_base 41: mod_base = OTHER; note = 2'-O-methyl uridine
  modified_base 42: mod_base = OTHER; note = 2'-O-methyl cytidine
  modified_base 43: mod_base = OTHER; note = 2'-O-methyl adenosine
  modified_base 44: mod_base = OTHER; note = 2'-O-methyl uridine
  modified_base 45: mod_base = OTHER; note = 2'-O-methyl uridine phosphorothioate
  modified_base 46: mod_base = OTHER; note = 2'-O-methyl uridine phosphorothioate
  modified_base 47: mod_base = OTHER; note = 2'-O-methyl cytidine phosphorothioate
  modified_base 48: mod_base = OTHER; note = 2'-O-methyl guanosine
  misc_feature 1..6: note = RNA
  misc_feature 7: note = DNA
  misc_feature 8..48: note = RNA

SEQ ID NO: 346 - DNA, 48 bp, synthetic construct; identical to SEQ ID NO: 317
  source 1..48: mol_type = other DNA
  modified_base 1: mod_base = OTHER; note = 2'-O-methyl cytidine phosphorothioate
  modified_base 2: mod_base = OTHER; note = 2'-O-methyl uridine phosphorothioate
  modified_base 3: mod_base = OTHER; note = 2'-O-methyl guanosine phosphorothioate
  modified_base 4: mod_base = OTHER; note = 2'-O-methyl adenosine
  modified_base 5: mod_base = OTHER; note = 2'-O-methyl adenosine
  modified_base 6: mod_base = OTHER; note = 2'-O-methyl cytidine
  modified_base 7: mod_base = OTHER; note = Deoxythymidine phosphorothioate
  modified_base 8: mod_base = OTHER; note = 2'-O-methyl uridine
  modified_base 9: mod_base = OTHER; note = 2'-O-methyl guanosine
  modified_base 10: mod_base = OTHER; note = 2'-O-methyl uridine
  modified_base 11: mod_base = OTHER; note = 2'-O-methyl guanosine
  modified_base 12: mod_base = OTHER; note = 2'-O-methyl guanosine
  modified_base 13: mod_base = OTHER; note = 2'-O-methyl cytidine
  modified_base 14: mod_base = OTHER; note = 2'-fluoro cytidine
  modified_base 15: mod_base = OTHER; note = 2'-O-methyl guanosine
  modified_base 16: mod_base = OTHER; note = 2'-fluoro uridine
  modified_base 17: mod_base = OTHER; note = 2'-O-methyl uridine
  modified_base 18: mod_base = OTHER; note = 2'-O-methyl uridine
  modified_base 22: mod_base = OTHER; note = 2'-O-methyl uridine
  modified_base 25: mod_base = OTHER; note = 2'-O-methyl guanosine
  modified_base 28: mod_base = OTHER; note = 2'-O-methyl guanosine
  modified_base 29: mod_base = OTHER; note = 2'-O-methyl uridine
  modified_base 30: mod_base = OTHER; note = 2'-O-methyl adenosine
  modified_base 31: mod_base = OTHER; note = 2'-O-methyl guanosine
  modified_base 32: mod_base = OTHER; note = 2'-O-methyl cytidine
  modified_base 35: mod_base = OTHER; note = 2'-O-methyl cytidine
  modified_base 36: mod_base = OTHER; note = 2'-O-methyl cytidine
  modified_base 38: mod_base = OTHER; note = 2'-O-methyl uridine
  modified_base 39: mod_base = OTHER; note = 2'-O-methyl uridine
  modified_base 40: mod_base = OTHER; note = 2'-O-methyl cytidine
  modified_base 41: mod_base = OTHER; note = 2'-O-methyl uridine
  modified_base 42: mod_base = OTHER; note = 2'-O-methyl cytidine
  modified_base 43: mod_base = OTHER; note = 2'-O-methyl adenosine
  modified_base 44: mod_base = OTHER; note = 2'-O-methyl uridine
  modified_base 45: mod_base = OTHER; note = 2'-O-methyl uridine phosphorothioate
  modified_base 46: mod_base = OTHER; note = 2'-O-methyl uridine phosphorothioate
  modified_base 47: mod_base = OTHER; note = 2'-O-methyl cytidine phosphorothioate
  modified_base 48: mod_base = OTHER; note = 2'-O-methyl guanosine
  misc_feature 1..6: note = RNA
  misc_feature 7: note = DNA
  misc_feature 8..48: note = RNA

SEQ ID NO: 347 - DNA, 48 bp, synthetic construct; identical to SEQ ID NO: 317
  source 1..48: mol_type = other DNA
  modified_base 1: mod_base = OTHER; note = 2'-O-methyl cytidine phosphorothioate
  modified_base 2: mod_base = OTHER; note = 2'-O-methyl uridine phosphorothioate
  modified_base 3: mod_base = OTHER; note = 2'-O-methyl guanosine phosphorothioate
  modified_base 4: mod_base = OTHER; note = 2'-O-methyl adenosine
  modified_base 5: mod_base = OTHER; note = 2'-O-methyl adenosine
  modified_base 6: mod_base = OTHER; note = 2'-O-methyl cytidine
  modified_base 7: mod_base = OTHER; note = Deoxythymidine phosphorothioate
  modified_base 8: mod_base = OTHER; note = 2'-O-methyl uridine
  modified_base 9: mod_base = OTHER; note = 2'-O-methyl guanosine
  modified_base 10: mod_base = OTHER; note = 2'-O-methyl uridine
  modified_base 11: mod_base = OTHER; note = 2'-O-methyl guanosine
  modified_base 12: mod_base = OTHER; note = 2'-O-methyl guanosine
  modified_base 13: mod_base = OTHER; note = 2'-O-methyl cytidine
  modified_base 14: mod_base = OTHER; note = 2'-fluoro cytidine
  modified_base 15: mod_base = OTHER; note = 2'-O-methyl guanosine
  modified_base 16: mod_base = OTHER; note = 2'-fluoro uridine
  modified_base 17: mod_base = OTHER; note = 2'-O-methyl uridine
  modified_base 18: mod_base = OTHER; note = 2'-O-methyl uridine
  modified_base 22: mod_base = OTHER; note = 2'-O-methyl uridine
  modified_base 25: mod_base = OTHER; note = 2'-O-methyl guanosine
  modified_base 26: mod_base = OTHER; note = Uridine phosphorothioate
  modified_base 28: mod_base = OTHER; note = 2'-O-methyl guanosine
  modified_base 29: mod_base = OTHER; note = 2'-O-methyl uridine
  modified_base 30: mod_base = OTHER; note = 2'-O-methyl adenosine
  modified_base 31: mod_base = OTHER; note = 2'-O-methyl guanosine
  modified_base 32: mod_base = OTHER; note = 2'-O-methyl cytidine
  modified_base 33: mod_base = OTHER; note = Uridine phosphorothioate
  modified_base 35: mod_base = OTHER; note = 2'-O-methyl cytidine
  modified_base 37: mod_base = OTHER; note = Uridine phosphorothioate
  modified_base 38: mod_base = OTHER; note = 2'-O-methyl uridine
  modified_base 39: mod_base = OTHER; note = 2'-O-methyl uridine
  modified_base 40: mod_base = OTHER; note = 2'-O-methyl cytidine
  modified_base 41: mod_base = OTHER; note = 2'-O-methyl uridine
  modified_base 42: mod_base = OTHER; note = 2'-O-methyl cytidine
  modified_base 43: mod_base = OTHER; note = 2'-O-methyl adenosine
  modified_base 44: mod_base = OTHER; note = 2'-O-methyl uridine
  modified_base 45: mod_base = OTHER; note = 2'-O-methyl uridine phosphorothioate
  modified_base 46: mod_base = OTHER; note = 2'-O-methyl uridine phosphorothioate
  modified_base 47: mod_base = OTHER; note = 2'-O-methyl cytidine phosphorothioate
  modified_base 48: mod_base = OTHER; note = 2'-O-methyl guanosine
  misc_feature 1..6: note = RNA
  misc_feature 7: note = DNA
  misc_feature 8..48: note = RNA

SEQ ID NO: 348 - DNA, 48 bp, synthetic construct; identical to SEQ ID NO: 317
  source 1..48: mol_type = other DNA
  modified_base 1: mod_base = OTHER; note = 2'-O-methyl cytidine phosphorothioate
  modified_base 2: mod_base = OTHER; note = 2'-O-methyl uridine phosphorothioate
  modified_base 3: mod_base = OTHER; note = 2'-O-methyl guanosine phosphorothioate
  modified_base 4: mod_base = OTHER; note = 2'-O-methyl adenosine
  modified_base 5: mod_base = OTHER; note = 2'-O-methyl adenosine
  modified_base 6: mod_base = OTHER; note = 2'-O-methyl cytidine
  modified_base 7: mod_base = OTHER; note = Deoxythymidine phosphorothioate
  modified_base 8: mod_base = OTHER; note = 2'-O-methyl uridine
  modified_base 9: mod_base = OTHER; note = 2'-O-methyl guanosine
  modified_base 10: mod_base = OTHER; note = 2'-O-methyl uridine
  modified_base 11: mod_base = OTHER; note = 2'-O-methyl guanosine
  modified_base 12: mod_base = OTHER; note = 2'-O-methyl guanosine
  modified_base 13: mod_base = OTHER; note = 2'-O-methyl cytidine
  modified_base 14: mod_base = OTHER; note = 2'-fluoro cytidine
  modified_base 15: mod_base = OTHER; note = 2'-O-methyl guanosine
  modified_base 16: mod_base = OTHER; note = 2'-fluoro uridine
  modified_base 17: mod_base = OTHER; note = 2'-O-methyl uridine
  modified_base 18: mod_base = OTHER; note = 2'-O-methyl uridine
  modified_base 22: mod_base = OTHER; note = 2'-O-methyl uridine
  modified_base 25: mod_base = OTHER; note = 2'-O-methyl guanosine
  modified_base 26: mod_base = OTHER; note = Uridine phosphorothioate
  modified_base 28: mod_base = OTHER; note = 2'-O-methyl guanosine
  modified_base 29: mod_base = OTHER; note = 2'-O-methyl uridine
  modified_base 30: mod_base = OTHER; note = 2'-O-methyl adenosine
  modified_base 31: mod_base = OTHER; note = 2'-O-methyl guanosine
  modified_base 32: mod_base = OTHER; note = 2'-O-methyl cytidine
  modified_base 33: mod_base = OTHER; note = Uridine phosphorothioate
  modified_base 34: mod_base = OTHER; note = Cytidine phosphorothioate
  modified_base 35: mod_base = OTHER; note = 2'-O-methyl cytidine
  modified_base 37: mod_base = OTHER; note = Uridine phosphorothioate
  modified_base 38: mod_base = OTHER; note = 2'-O-methyl uridine
  modified_base 39: mod_base = OTHER; note = 2'-O-methyl uridine
  modified_base 40: mod_base = OTHER; note = 2'-O-methyl cytidine
  modified_base 41: mod_base = OTHER; note = 2'-O-methyl uridine
  modified_base 42: mod_base = OTHER; note = 2'-O-methyl cytidine
  modified_base 43: mod_base = OTHER; note = 2'-O-methyl adenosine
  modified_base 44: mod_base = OTHER; note = 2'-O-methyl uridine
  modified_base 45: mod_base = OTHER; note = 2'-O-methyl uridine phosphorothioate
  modified_base 46: mod_base = OTHER; note = 2'-O-methyl uridine phosphorothioate
  modified_base 47: mod_base = OTHER; note = 2'-O-methyl cytidine phosphorothioate
  modified_base 48: mod_base = OTHER; note = 2'-O-methyl guanosine
  misc_feature 1..6: note = RNA
  misc_feature 7: note = DNA
  misc_feature 8..48: note = RNA

SEQ ID NO: 349 - DNA, 48 bp, synthetic construct; identical to SEQ ID NO: 317
  source 1..48: mol_type = other DNA
  modified_base 1: mod_base = OTHER; note = 2'-O-methyl cytidine phosphorothioate
  modified_base 2: mod_base = OTHER; note = 2'-O-methyl uridine phosphorothioate
  modified_base 3: mod_base = OTHER; note = 2'-O-methyl guanosine phosphorothioate
  modified_base 4: mod_base = OTHER; note = 2'-O-methyl adenosine
  modified_base 5: mod_base = OTHER; note = 2'-O-methyl adenosine
  modified_base 6: mod_base = OTHER; note = 2'-O-methyl cytidine
  modified_base 7: mod_base = OTHER; note = Deoxythymidine phosphorothioate
  modified_base 8: mod_base = OTHER; note = 2'-O-methyl uridine
  modified_base 9: mod_base = OTHER; note = 2'-O-methyl guanosine
  modified_base 10: mod_base = OTHER; note = 2'-O-methyl uridine
  modified_base 11: mod_base = OTHER; note = 2'-O-methyl guanosine
  modified_base 12: mod_base = OTHER; note = 2'-O-methyl guanosine
  modified_base 13: mod_base = OTHER; note = 2'-O-methyl cytidine
  modified_base 14: mod_base = OTHER; note = 2'-fluoro cytidine
  modified_base 15: mod_base = OTHER; note = 2'-O-methyl guanosine
  modified_base 16: mod_base = OTHER; note = 2'-fluoro uridine
  modified_base 17: mod_base = OTHER; note = 2'-O-methyl uridine
  modified_base 18: mod_base = OTHER; note = 2'-O-methyl uridine
  modified_base 22: mod_base = OTHER; note = 2'-O-methyl uridine
  modified_base 25: mod_base = OTHER; note = 2'-O-methyl guanosine
  modified_base 26: mod_base = OTHER; note = Uridine phosphorothioate
  modified_base 28: mod_base = OTHER; note = 2'-O-methyl guanosine
  modified_base 29: mod_base = OTHER; note = 2'-O-methyl uridine
  modified_base 30: mod_base = OTHER; note = 2'-O-methyl adenosine
  modified_base 31: mod_base = OTHER; note = 2'-O-methyl guanosine
  modified_base 32: mod_base = OTHER; note = 2'-O-methyl cytidine
  modified_base 33: mod_base = OTHER; note = Uridine phosphorothioate
  modified_base 34: mod_base = OTHER; note = Cytidine phosphorothioate
  modified_base 35: mod_base = OTHER; note = 2'-O-methyl cytidine
  modified_base 36: mod_base = OTHER; note = 2'-O-methyl cytidine
  modified_base 37: mod_base = OTHER; note = Uridine phosphorothioate
  modified_base 38: mod_base = OTHER; note = 2'-O-methyl uridine
  modified_base 39: mod_base = OTHER; note = 2'-O-methyl uridine
  modified_base 40: mod_base = OTHER; note = 2'-O-methyl cytidine
  modified_base 41: mod_base = OTHER; note = 2'-O-methyl uridine
  modified_base 42: mod_base = OTHER; note = 2'-O-methyl cytidine
  modified_base 43: mod_base = OTHER; note = 2'-O-methyl adenosine
  modified_base 44: mod_base = OTHER; note = 2'-O-methyl uridine
  modified_base 45: mod_base = OTHER; note = 2'-O-methyl uridine phosphorothioate
  modified_base 46: mod_base = OTHER; note = 2'-O-methyl uridine phosphorothioate
  modified_base 47: mod_base = OTHER; note = 2'-O-methyl cytidine phosphorothioate
  modified_base 48: mod_base = OTHER; note = 2'-O-methyl guanosine
  misc_feature 1..6: note = RNA
  misc_feature 7: note = DNA
  misc_feature 8..48: note = RNA

SEQ ID NO: 350 - DNA, 48 bp, synthetic construct; identical to SEQ ID NO: 317
  source 1..48: mol_type = other DNA
  modified_base 1: mod_base = OTHER; note = 2'-O-methyl cytidine phosphorothioate
  modified_base 2: mod_base = OTHER; note = 2'-O-methyl uridine phosphorothioate
  modified_base 3: mod_base = OTHER; note = 2'-O-methyl guanosine phosphorothioate
  modified_base 4: mod_base = OTHER; note = 2'-O-methyl adenosine
  modified_base 5: mod_base = OTHER; note = 2'-O-methyl adenosine
  modified_base 6: mod_base = OTHER; note = 2'-O-methyl cytidine
  modified_base 7: mod_base = OTHER; note = Deoxythymidine phosphorothioate
  modified_base 8: mod_base = OTHER; note = 2'-O-methyl uridine
  modified_base 9: mod_base = OTHER; note = 2'-O-methyl guanosine
  modified_base 10: mod_base = OTHER; note = 2'-O-methyl uridine
  modified_base 11: mod_base = OTHER; note = 2'-O-methyl guanosine
  modified_base 12: mod_base = OTHER; note = 2'-O-methyl guanosine
  modified_base 13: mod_base = OTHER; note = 2'-O-methyl cytidine
  modified_base 14: mod_base = OTHER; note = 2'-fluoro cytidine
  modified_base 15: mod_base = OTHER; note = 2'-O-methyl guanosine
  modified_base 16: mod_base = OTHER; note = 2'-fluoro uridine
  modified_base 17: mod_base = OTHER; note = 2'-O-methyl uridine
  modified_base 18: mod_base = OTHER; note = 2'-O-methyl uridine
  modified_base 22: mod_base = OTHER; note = 2'-O-methyl uridine
  modified_base 25: mod_base = OTHER; note = 2'-O-methyl guanosine
  modified_base 26: mod_base = OTHER; note = Deoxythymidine phosphorothioate
  modified_base 28: mod_base = OTHER; note = 2'-O-methyl guanosine
  modified_base 29: mod_base = OTHER; note = 2'-O-methyl uridine
  modified_base 30: mod_base = OTHER; note = 2'-O-methyl adenosine
  modified_base 31: mod_base = OTHER; note = 2'-O-methyl guanosine
  modified_base 32: mod_base = OTHER; note = 2'-O-methyl cytidine
  modified_base 38: mod_base = OTHER; note = 2'-O-methyl uridine
  modified_base 39: mod_base = OTHER; note = 2'-O-methyl uridine
  modified_base 40: mod_base = OTHER; note = 2'-O-methyl cytidine
  modified_base 41: mod_base = OTHER; note = 2'-O-methyl uridine
  modified_base 42: mod_base = OTHER; note = 2'-O-methyl cytidine
  modified_base 43: mod_base = OTHER; note = 2'-O-methyl adenosine
  modified_base 44: mod_base = OTHER; note = 2'-O-methyl uridine
  modified_base 45: mod_base = OTHER; note = 2'-O-methyl uridine phosphorothioate
  modified_base 46: mod_base = OTHER; note = 2'-O-methyl uridine phosphorothioate
  modified_base 47: mod_base = OTHER; note = 2'-O-methyl cytidine phosphorothioate
  modified_base 48: mod_base = OTHER; note = 2'-O-methyl guanosine
  misc_feature 1..6: note = RNA
  misc_feature 7: note = DNA
  misc_feature 8..25: note = RNA
  misc_feature 26: note = DNA
  misc_feature 27..48: note = RNA

SEQ ID NO: 351 - DNA, 48 bp, synthetic construct; identical to SEQ ID NO: 317
  source 1..48: mol_type = other DNA
  modified_base 1: mod_base = OTHER; note = 2'-O-methyl cytidine phosphorothioate
  modified_base 2: mod_base = OTHER; note = 2'-O-methyl uridine phosphorothioate
  modified_base 3: mod_base = OTHER; note = 2'-O-methyl guanosine phosphorothioate
  modified_base 4: mod_base = OTHER; note = 2'-O-methyl adenosine
  modified_base 5: mod_base = OTHER; note = 2'-O-methyl adenosine
  modified_base 6: mod_base = OTHER; note = 2'-O-methyl cytidine
  modified_base 7: mod_base = OTHER; note = Deoxythymidine phosphorothioate
  modified_base 8: mod_base = OTHER; note = 2'-O-methyl uridine
  modified_base 9: mod_base = OTHER; note = 2'-O-methyl guanosine
  modified_base 10: mod_base = OTHER; note = 2'-O-methyl uridine
  modified_base 11: mod_base = OTHER; note = 2'-O-methyl guanosine
  modified_base 12: mod_base = OTHER; note = 2'-O-methyl guanosine
  modified_base 13: mod_base = OTHER; note = 2'-O-methyl cytidine
  modified_base 14: mod_base = OTHER; note = 2'-fluoro cytidine
  modified_base 15: mod_base = OTHER; note = 2'-O-methyl guanosine
  modified_base 16: mod_base = OTHER; note = 2'-fluoro uridine
  modified_base 17: mod_base = OTHER; note = 2'-O-methyl uridine
  modified_base 18: mod_base = OTHER; note = 2'-O-methyl uridine
  modified_base 22: mod_base = OTHER; note = 2'-O-methyl uridine
  modified_base 25: mod_base = OTHER; note = 2'-O-methyl guanosine
  modified_base 26: mod_base = OTHER; note = Deoxythymidine phosphorothioate
  modified_base 28: mod_base = OTHER; note = 2'-O-methyl guanosine
  modified_base 29: mod_base = OTHER; note = 2'-O-methyl uridine
  modified_base 30: mod_base = OTHER; note = 2'-O-methyl adenosine
  modified_base 31: mod_base = OTHER; note = 2'-O-methyl guanosine
  modified_base 32: mod_base = OTHER; note = 2'-O-methyl cytidine
  modified_base 35: mod_base = OTHER; note = 2'-O-methyl cytidine
  modified_base 38: mod_base = OTHER; note = 2'-O-methyl uridine
  modified_base 39: mod_base = OTHER; note = 2'-O-methyl uridine
  modified_base 40: mod_base = OTHER; note = 2'-O-methyl cytidine
  modified_base 41: mod_base = OTHER; note = 2'-O-methyl uridine
  modified_base 42: mod_base = OTHER; note = 2'-O-methyl cytidine
  modified_base 43: mod_base = OTHER; note = 2'-O-methyl adenosine
  modified_base 44: mod_base = OTHER; note = 2'-O-methyl uridine
  modified_base 45: mod_base = OTHER; note = 2'-O-methyl uridine phosphorothioate
  modified_base 46: mod_base = OTHER; note = 2'-O-methyl uridine phosphorothioate
  modified_base 47: mod_base = OTHER; note = 2'-O-methyl cytidine phosphorothioate
  modified_base 48: mod_base = OTHER; note = 2'-O-methyl guanosine
  misc_feature 1..6: note = RNA
  misc_feature 7: note = DNA
  misc_feature 8..25: note = RNA
  misc_feature 26: note = DNA
  misc_feature 27..48: note = RNA

SEQ ID NO: 352 - DNA, 48 bp, synthetic construct; identical to SEQ ID NO: 317
  source 1..48: mol_type = other DNA
  modified_base 1: mod_base = OTHER; note = 2'-O-methyl cytidine phosphorothioate
  modified_base 2: mod_base = OTHER; note = 2'-O-methyl uridine phosphorothioate
  modified_base 3: mod_base = OTHER; note = 2'-O-methyl guanosine phosphorothioate
  modified_base 4: mod_base = OTHER; note = 2'-O-methyl adenosine
  modified_base 5: mod_base = OTHER; note = 2'-O-methyl adenosine
  modified_base 6: mod_base = OTHER; note = 2'-O-methyl cytidine
  modified_base 7: mod_base = OTHER; note = Deoxythymidine phosphorothioate
  modified_base 8: mod_base = OTHER; note = 2'-O-methyl uridine
  modified_base 9: mod_base = OTHER; note = 2'-O-methyl guanosine
  modified_base 10: mod_base = OTHER; note = 2'-O-methyl uridine
  modified_base 11: mod_base = OTHER; note = 2'-O-methyl guanosine
  modified_base 12: mod_base = OTHER; note = 2'-O-methyl guanosine
  modified_base 13: mod_base = OTHER; note = 2'-O-methyl cytidine
  modified_base 14: mod_base = OTHER; note = 2'-fluoro cytidine
  modified_base 15: mod_base = OTHER; note = 2'-O-methyl guanosine
  modified_base 16: mod_base = OTHER; note = 2'-fluoro uridine
  modified_base 17: mod_base = OTHER; note = 2'-O-methyl uridine
  modified_base 18: mod_base = OTHER; note = 2'-O-methyl uridine
  modified_base 22: mod_base = OTHER; note = 2'-O-methyl uridine
  modified_base 25: mod_base = OTHER; note = 2'-O-methyl guanosine
  modified_base 26: mod_base = OTHER; note = Deoxythymidine phosphorothioate
  modified_base 28: mod_base = OTHER; note = 2'-O-methyl guanosine
  modified_base 29: mod_base = OTHER; note = 2'-O-methyl uridine
  modified_base 30: mod_base = OTHER; note = 2'-O-methyl adenosine
  modified_base 31: mod_base = OTHER; note = 2'-O-methyl guanosine
  modified_base 32: mod_base = OTHER; note = 2'-O-methyl cytidine
  modified_base 36: mod_base = OTHER; note = 2'-O-methyl cytidine
  modified_base 38: mod_base = OTHER; note = 2'-O-methyl uridine
  modified_base 39: mod_base = OTHER; note = 2'-O-methyl uridine
  modified_base 40: mod_base = OTHER; note = 2'-O-methyl cytidine
  modified_base 41: mod_base = OTHER; note = 2'-O-methyl uridine
  modified_base 42: mod_base = OTHER; note = 2'-O-methyl cytidine
  modified_base 43: mod_base = OTHER; note = 2'-O-methyl adenosine
  modified_base 44: mod_base = OTHER; note = 2'-O-methyl uridine
  modified_base 45: mod_base = OTHER; note = 2'-O-methyl uridine phosphorothioate
  modified_base 46: mod_base = OTHER; note = 2'-O-methyl uridine phosphorothioate
  modified_base 47: mod_base = OTHER; note = 2'-O-methyl cytidine phosphorothioate
  modified_base 48: mod_base = OTHER; note = 2'-O-methyl guanosine
  misc_feature 1..6: note = RNA
  misc_feature 7: note = DNA
  misc_feature 8..25: note = RNA
  misc_feature 26: note = DNA
  misc_feature 27..48: note = RNA

SEQ ID NO: 353 - DNA, 48 bp, synthetic construct; identical to SEQ ID NO: 317
  source 1..48: mol_type = other DNA
  modified_base 1: mod_base = OTHER; note = 2'-O-methyl cytidine phosphorothioate
  modified_base 2: mod_base = OTHER; note = 2'-O-methyl uridine phosphorothioate
  modified_base 3: mod_base = OTHER; note = 2'-O-methyl guanosine phosphorothioate
  modified_base 4: mod_base = OTHER; note = 2'-O-methyl adenosine
  modified_base 5: mod_base = OTHER; note = 2'-O-methyl adenosine
  modified_base 6: mod_base = OTHER; note = 2'-O-methyl cytidine
  modified_base 7: mod_base = OTHER; note = Deoxythymidine phosphorothioate
  modified_base 8: mod_base = OTHER; note = 2'-O-methyl uridine
  modified_base 9: mod_base = OTHER; note = 2'-O-methyl guanosine
  modified_base 10: mod_base = OTHER; note = 2'-O-methyl uridine
  modified_base 11: mod_base = OTHER; note = 2'-O-methyl guanosine
  modified_base 12: mod_base = OTHER; note = 2'-O-methyl guanosine
  modified_base 13: mod_base = OTHER; note = 2'-O-methyl cytidine
  modified_base 14: mod_base = OTHER; note = 2'-fluoro cytidine
  modified_base 15: mod_base = OTHER; note = 2'-O-methyl guanosine
  modified_base 16: mod_base = OTHER; note = 2'-fluoro uridine
  modified_base 17: mod_base = OTHER; note = 2'-O-methyl uridine
  modified_base 18: mod_base = OTHER; note = 2'-O-methyl uridine
  modified_base 22: mod_base = OTHER; note = 2'-O-methyl uridine
  modified_base 25: mod_base = OTHER; note = 2'-O-methyl guanosine
  modified_base 26: mod_base = OTHER; note = Deoxythymidine phosphorothioate
  modified_base 28: mod_base = OTHER; note = 2'-O-methyl guanosine
  modified_base 29: mod_base = OTHER; note = 2'-O-methyl uridine
  modified_base 30: mod_base = OTHER; note = 2'-O-methyl adenosine
  modified_base 31: mod_base = OTHER; note = 2'-O-methyl guanosine
  modified_base 32: mod_base = OTHER; note = 2'-O-methyl cytidine
  modified_base 35: mod_base = OTHER; note = 2'-O-methyl cytidine
  modified_base 36: mod_base = OTHER; note = 2'-O-methyl cytidine
  modified_base 38: mod_base = OTHER; note = 2'-O-methyl uridine
  modified_base 39: mod_base = OTHER; note = 2'-O-methyl uridine
  modified_base 40: mod_base = OTHER; note = 2'-O-methyl cytidine
  modified_base 41: mod_base = OTHER; note = 2'-O-methyl uridine
  modified_base 42: mod_base = OTHER; note = 2'-O-methyl cytidine
  modified_base 43: mod_base = OTHER; note = 2'-O-methyl adenosine
  modified_base 44: mod_base = OTHER; note = 2'-O-methyl uridine
  modified_base 45: mod_base = OTHER; note = 2'-O-methyl uridine phosphorothioate
  modified_base 46: mod_base = OTHER; note = 2'-O-methyl uridine phosphorothioate
  modified_base 47: mod_base = OTHER; note = 2'-O-methyl cytidine phosphorothioate
  modified_base 48: mod_base = OTHER; note = 2'-O-methyl guanosine
  misc_feature 1..6: note = RNA
  misc_feature 7: note = DNA
  misc_feature 8..25: note = RNA
  misc_feature 26: note = DNA
  misc_feature 27..48: note = RNA

SEQ ID NO: 354 - DNA, 48 bp, synthetic construct; identical to SEQ ID NO: 317
  source 1..48: mol_type = other DNA
  modified_base 1: mod_base = OTHER; note = 2'-O-methyl cytidine phosphorothioate
  modified_base 2: mod_base = OTHER; note = 2'-O-methyl uridine phosphorothioate
  modified_base 3: mod_base = OTHER; note = 2'-O-methyl guanosine phosphorothioate
  modified_base 4: mod_base = OTHER; note = 2'-O-methyl adenosine
  modified_base 5: mod_base = OTHER; note = 2'-O-methyl adenosine
  modified_base 6: mod_base = OTHER; note = 2'-O-methyl cytidine
  modified_base 7: mod_base = OTHER; note = Deoxythymidine phosphorothioate
  modified_base 8: mod_base = OTHER; note = 2'-O-methyl uridine
  modified_base 9: mod_base = OTHER; note = 2'-O-methyl guanosine
  modified_base 10: mod_base = OTHER; note = 2'-O-methyl uridine
  modified_base 11: mod_base = OTHER; note = 2'-O-methyl guanosine
  modified_base 12: mod_base = OTHER; note = 2'-O-methyl guanosine
  modified_base 13: mod_base = OTHER; note = 2'-O-methyl cytidine
  modified_base 14: mod_base = OTHER; note = 2'-fluoro cytidine
  modified_base 15: mod_base = OTHER; note = 2'-O-methyl guanosine
  modified_base 16: mod_base = OTHER; note = 2'-fluoro uridine
  modified_base 17: mod_base = OTHER; note = 2'-O-methyl uridine
  modified_base 18: mod_base = OTHER; note = 2'-O-methyl uridine
  modified_base 22: mod_base = OTHER; note = 2'-O-methyl uridine
  modified_base 25: mod_base = OTHER; note = 2'-O-methyl guanosine
  modified_base 29: mod_base = OTHER; note = 2'-O-methyl uridine
  modified_base 30: mod_base = OTHER; note = 2'-O-methyl adenosine
  modified_base 31: mod_base = OTHER; note = 2'-O-methyl guanosine
  modified_base 32: mod_base = OTHER; note = 2'-O-methyl cytidine
  modified_base 33: mod_base = OTHER; note = Deoxythymidine phosphorothioate
  modified_base 38: mod_base = OTHER; note = 2'-O-methyl uridine
  modified_base 39: mod_base = OTHER; note = 2'-O-methyl uridine
  modified_base 40: mod_base = OTHER; note = 2'-O-methyl cytidine
  modified_base 41: mod_base = OTHER; note = 2'-O-methyl uridine
  modified_base 42: mod_base = OTHER; note = 2'-O-methyl cytidine
  modified_base 43: mod_base = OTHER; note = 2'-O-methyl adenosine
  modified_base 44: mod_base = OTHER; note = 2'-O-methyl uridine
  modified_base 45: mod_base = OTHER; note = 2'-O-methyl uridine phosphorothioate
  modified_base 46: mod_base = OTHER; note = 2'-O-methyl uridine phosphorothioate
  modified_base 47: mod_base = OTHER; note = 2'-O-methyl cytidine phosphorothioate
  modified_base 48: mod_base = OTHER; note = 2'-O-methyl guanosine
  misc_feature 1..6: note = RNA
  misc_feature 7: note = DNA
  misc_feature 8..32: note = RNA
  misc_feature 33: note = DNA
  misc_feature 34..48: note = RNA

SEQ ID NO: 355 - DNA, 48 bp, synthetic construct; identical to SEQ ID NO: 317
  source 1..48: mol_type = other DNA
  modified_base 1: mod_base = OTHER; note = 2'-O-methyl cytidine phosphorothioate
  modified_base 2: mod_base = OTHER; note = 2'-O-methyl uridine phosphorothioate
  modified_base 3: mod_base = OTHER; note = 2'-O-methyl guanosine phosphorothioate
  modified_base 4: mod_base = OTHER; note = 2'-O-methyl adenosine
  modified_base 5: mod_base = OTHER; note = 2'-O-methyl adenosine
  modified_base 6: mod_base = OTHER; note = 2'-O-methyl cytidine
  modified_base 7: mod_base = OTHER; note = Deoxythymidine phosphorothioate
  modified_base 8: mod_base = OTHER; note = 2'-O-methyl uridine
  modified_base 9: mod_base = OTHER; note = 2'-O-methyl guanosine
  modified_base 10: mod_base = OTHER; note = 2'-O-methyl uridine
  modified_base 11: mod_base = OTHER; note = 2'-O-methyl guanosine
  modified_base 12: mod_base = OTHER; note = 2'-O-methyl guanosine
  modified_base 13: mod_base = OTHER; note = 2'-O-methyl cytidine
  modified_base 14: mod_base = OTHER; note = 2'-fluoro cytidine
  modified_base 15: mod_base = OTHER; note = 2'-O-methyl guanosine
  modified_base 16: mod_base = OTHER; note = 2'-fluoro uridine
  modified_base 17: mod_base = OTHER; note = 2'-O-methyl uridine
  modified_base 18: mod_base = OTHER; note = 2'-O-methyl uridine
  modified_base 22: mod_base = OTHER; note = 2'-O-methyl uridine
  modified_base 25: mod_base = OTHER; note = 2'-O-methyl guanosine
  modified_base 29: mod_base = OTHER; note = 2'-O-methyl uridine
  modified_base 30: mod_base = OTHER; note = 2'-O-methyl adenosine
  modified_base 31: mod_base = OTHER; note = 2'-O-methyl guanosine
  modified_base 32: mod_base = OTHER; note = 2'-O-methyl cytidine
  modified_base 34: mod_base = OTHER; note = Deoxycytidine phosphorothioate
  modified_base 38: mod_base = OTHER; note = 2'-O-methyl uridine
  modified_base 39: mod_base = OTHER; note = 2'-O-methyl uridine
  modified_base 40: mod_base = OTHER; note = 2'-O-methyl cytidine
  modified_base 41: mod_base = OTHER; note = 2'-O-methyl uridine
  modified_base 42: mod_base = OTHER; note = 2'-O-methyl cytidine
  modified_base 43: mod_base = OTHER; note = 2'-O-methyl adenosine
  modified_base 44: mod_base = OTHER; note = 2'-O-methyl uridine
  modified_base 45: mod_base = OTHER; note = 2'-O-methyl uridine phosphorothioate
  modified_base 46: mod_base = OTHER; note = 2'-O-methyl uridine phosphorothioate
  modified_base 47: mod_base = OTHER; note = 2'-O-methyl cytidine phosphorothioate
  modified_base 48: mod_base = OTHER; note = 2'-O-methyl guanosine
  misc_feature 1..6: note = RNA
  misc_feature 7: note = DNA
  misc_feature 8..33: note = RNA
  misc_feature 34: note = DNA
  misc_feature 35..48: note = RNA

SEQ ID NO: 356 - DNA, 48 bp, synthetic construct; identical to SEQ ID NO: 317
  source 1..48: mol_type = other DNA
  modified_base 1: mod_base = OTHER; note = 2'-O-methyl cytidine phosphorothioate
  modified_base 2: mod_base = OTHER; note = 2'-O-methyl uridine phosphorothioate
  modified_base 3: mod_base = OTHER; note = 2'-O-methyl guanosine phosphorothioate
  modified_base 4: mod_base = OTHER; note = 2'-O-methyl adenosine
  modified_base 5: mod_base = OTHER; note = 2'-O-methyl adenosine
  modified_base 6: mod_base = OTHER; note = 2'-O-methyl cytidine
  modified_base 7: mod_base = OTHER; note = Deoxythymidine phosphorothioate
  modified_base 8: mod_base = OTHER; note = 2'-O-methyl uridine
  modified_base 9: mod_base = OTHER; note = 2'-O-methyl guanosine
  modified_base 10: mod_base = OTHER; note = 2'-O-methyl uridine
  modified_base 11: mod_base = OTHER; note = 2'-O-methyl guanosine
  modified_base 12: mod_base = OTHER; note = 2'-O-methyl guanosine
  modified_base 13: mod_base = OTHER; note = 2'-O-methyl cytidine
  modified_base 14: mod_base = OTHER; note = 2'-fluoro cytidine
  modified_base 15: mod_base = OTHER; note = 2'-O-methyl guanosine
  modified_base 16: mod_base = OTHER; note = 2'-fluoro uridine
  modified_base 17: mod_base = OTHER; note = 2'-O-methyl uridine
  modified_base 18: mod_base = OTHER; note = 2'-O-methyl uridine
  modified_base 22: mod_base = OTHER; note = 2'-O-methyl uridine
  modified_base 25: mod_base = OTHER; note = 2'-O-methyl guanosine
  modified_base 29: mod_base = OTHER; note = 2'-O-methyl uridine
  modified_base 30: mod_base = OTHER; note = 2'-O-methyl adenosine
  modified_base 31: mod_base = OTHER; note = 2'-O-methyl guanosine
  modified_base 32: mod_base = OTHER; note = 2'-O-methyl cytidine
  modified_base 35: mod_base = OTHER; note = Deoxycytidine phosphorothioate
  modified_base 38: mod_base = OTHER; note = 2'-O-methyl uridine
  modified_base 39: mod_base = OTHER; note = 2'-O-methyl uridine
  modified_base 40: mod_base = OTHER; note = 2'-O-methyl cytidine
  modified_base 41: mod_base = OTHER; note = 2'-O-methyl uridine
  modified_base 42: mod_base = OTHER; note = 2'-O-methyl cytidine
  modified_base 43: mod_base = OTHER; note = 2'-O-methyl adenosine
  modified_base 44: mod_base = OTHER; note = 2'-O-methyl uridine
  modified_base 45: mod_base = OTHER; note = 2'-O-methyl uridine phosphorothioate
  modified_base 46: mod_base = OTHER; note = 2'-O-methyl uridine phosphorothioate
  modified_base 47: mod_base = OTHER; note = 2'-O-methyl cytidine phosphorothioate
  modified_base 48: mod_base = OTHER; note = 2'-O-methyl guanosine
  misc_feature 1..6: note = RNA
  misc_feature 7: note = DNA
  misc_feature 8..34: note = RNA
  misc_feature 35: note = DNA
  misc_feature 36..48: note = RNA

SEQ ID NO: 357 - DNA, 48 bp, synthetic construct; identical to SEQ ID NO: 317
  source 1..48: mol_type = other DNA
  modified_base 1: mod_base = OTHER; note = 2'-O-methyl cytidine phosphorothioate
  modified_base 2: mod_base = OTHER; note = 2'-O-methyl uridine phosphorothioate
  modified_base 3: mod_base = OTHER; note = 2'-O-methyl guanosine phosphorothioate
  modified_base 4: mod_base = OTHER; note = 2'-O-methyl adenosine
  modified_base 5: mod_base = OTHER; note = 2'-O-methyl adenosine
  modified_base 6: mod_base = OTHER; note = 2'-O-methyl cytidine
  modified_base 7: mod_base = OTHER; note = Deoxythymidine phosphorothioate
  modified_base 8: mod_base = OTHER; note = 2'-O-methyl uridine
  modified_base 9: mod_base = OTHER; note = 2'-O-methyl guanosine
  modified_base 10: mod_base = OTHER; note = 2'-O-methyl uridine
  modified_base 11: mod_base = OTHER; note = 2'-O-methyl guanosine
  modified_base 12: mod_base = OTHER; note = 2'-O-methyl guanosine
  modified_base 13: mod_base = OTHER; note = 2'-O-methyl cytidine
  modified_base 14: mod_base = OTHER; note = 2'-fluoro cytidine
  modified_base 15: mod_base = OTHER; note = 2'-O-methyl guanosine
  modified_base 16: mod_base = OTHER; note = 2'-fluoro uridine
  modified_base 17: mod_base = OTHER; note = 2'-O-methyl uridine
  modified_base 18: mod_base = OTHER; note = 2'-O-methyl uridine
  modified_base 22: mod_base = OTHER; note = 2'-O-methyl uridine
  modified_base 25: mod_base = OTHER; note = 2'-O-methyl guanosine
  modified_base 29: mod_base = OTHER; note = 2'-O-methyl uridine
  modified_base 30: mod_base = OTHER; note = 2'-O-methyl adenosine
  modified_base 31: mod_base = OTHER; note = 2'-O-methyl guanosine
  modified_base 32: mod_base = OTHER; note = 2'-O-methyl cytidine
  modified_base 36: mod_base = OTHER; note = Deoxycytidine phosphorothioate
  modified_base 38: mod_base = OTHER; note = 2'-O-methyl uridine
  modified_base 39: mod_base = OTHER; note = 2'-O-methyl uridine
  modified_base 40: mod_base = OTHER; note = 2'-O-methyl cytidine
  modified_base 41: mod_base = OTHER; note = 2'-O-methyl uridine
  modified_base 42: mod_base = OTHER; note = 2'-O-methyl cytidine
  modified_base 43: mod_base = OTHER; note = 2'-O-methyl adenosine
  modified_base 44: mod_base = OTHER; note = 2'-O-methyl uridine
  modified_base 45: mod_base = OTHER; note = 2'-O-methyl uridine phosphorothioate
  modified_base 46: mod_base = OTHER; note = 2'-O-methyl uridine phosphorothioate
  modified_base 47: mod_base = OTHER; note = 2'-O-methyl cytidine phosphorothioate
  modified_base 48: mod_base = OTHER; note = 2'-O-methyl guanosine
  misc_feature 1..6: note = RNA
  misc_feature 7: note = DNA
  misc_feature 8..35: note = RNA
  misc_feature 36: note = DNA
  misc_feature 37..48: note = RNA

SEQ ID NO: 358 - DNA, 48 bp, synthetic construct; identical to SEQ ID NO: 317
  source 1..48: mol_type = other DNA
  modified_base 1: mod_base = OTHER; note = 2'-O-methyl cytidine phosphorothioate
  modified_base 2: mod_base = OTHER; note = 2'-O-methyl uridine phosphorothioate
  modified_base 3: mod_base = OTHER; note = 2'-O-methyl guanosine phosphorothioate
  modified_base 4: mod_base = OTHER; note = 2'-O-methyl adenosine
  modified_base 5: mod_base = OTHER; note = 2'-O-methyl adenosine
  modified_base 6: mod_base = OTHER; note = 2'-O-methyl cytidine
  modified_base 7: mod_base = OTHER; note = Deoxythymidine phosphorothioate
  modified_base 8: mod_base = OTHER; note = 2'-O-methyl uridine
  modified_base 9: mod_base = OTHER; note = 2'-O-methyl guanosine
  modified_base 10: mod_base = OTHER; note = 2'-O-methyl uridine
  modified_base 11: mod_base = OTHER; note = 2'-O-methyl guanosine
  modified_base 12: mod_base = OTHER; note = 2'-O-methyl guanosine
  modified_base 13: mod_base = OTHER; note = 2'-O-methyl cytidine
  modified_base 14: mod_base = OTHER; note = 2'-fluoro cytidine
  modified_base 15: mod_base = OTHER; note = 2'-O-methyl guanosine
  modified_base 16: mod_base = OTHER; note = 2'-fluoro uridine
  modified_base 17: mod_base = OTHER; note = 2'-O-methyl uridine
  modified_base 18: mod_base = OTHER; note = 2'-O-methyl uridine
  modified_base 22: mod_base = OTHER; note = 2'-O-methyl uridine
  modified_base 25: mod_base = OTHER; note = 2'-O-methyl guanosine
  modified_base 29: mod_base = OTHER; note = 2'-O-methyl uridine
  modified_base 30: mod_base = OTHER; note = 2'-O-methyl adenosine
  modified_base 31: mod_base = OTHER; note = 2'-O-methyl guanosine
  modified_base 32: mod_base = OTHER; note = 2'-O-methyl cytidine
  modified_base 37: mod_base = OTHER; note = Deoxythymidine phosphorothioate
  modified_base 38: mod_base = OTHER; note = 2'-O-methyl uridine
  modified_base 39: mod_base = OTHER; note = 2'-O-methyl uridine
  modified_base 40: mod_base = OTHER; note = 2'-O-methyl cytidine
  modified_base 41: mod_base = OTHER; note = 2'-O-methyl uridine
  modified_base 42: mod_base = OTHER; note = 2'-O-methyl cytidine
  modified_base 43: mod_base = OTHER; note = 2'-O-methyl adenosine
  modified_base 44: mod_base = OTHER; note = 2'-O-methyl uridine
  modified_base 45: mod_base = OTHER; note = 2'-O-methyl uridine phosphorothioate
  modified_base 46: mod_base = OTHER; note = 2'-O-methyl uridine phosphorothioate
  modified_base 47: mod_base = OTHER; note = 2'-O-methyl cytidine phosphorothioate
  modified_base 48: mod_base = OTHER; note = 2'-O-methyl guanosine
  misc_feature 1..6: note = RNA
  misc_feature 7: note = DNA
  misc_feature 8..36: note = RNA
  misc_feature 37: note = DNA
  misc_feature 38..48: note = RNA

SEQ ID NO: 359 - DNA, 48 bp, synthetic construct; identical to SEQ ID NO: 317
  source 1..48: mol_type = other DNA
  modified_base 1: mod_base = OTHER; note = 2'-O-methyl cytidine phosphorothioate
  modified_base 2: mod_base = OTHER; note = 2'-O-methyl uridine phosphorothioate
  modified_base 3: mod_base = OTHER; note = 2'-O-methyl guanosine phosphorothioate
  modified_base 4: mod_base = OTHER; note = 2'-O-methyl adenosine
  modified_base 5: mod_base = OTHER; note = 2'-O-methyl adenosine
  modified_base 6: mod_base = OTHER; note = 2'-O-methyl cytidine
  modified_base 7: mod_base = OTHER; note = Deoxythymidine phosphorothioate
  modified_base 8: mod_base = OTHER; note = 2'-O-methyl uridine
  modified_base 9: mod_base = OTHER; note = 2'-O-methyl guanosine
  modified_base 10: mod_base = OTHER; note = 2'-O-methyl uridine
  modified_base 11: mod_base = OTHER; note = 2'-O-methyl guanosine
  modified_base 12: mod_base = OTHER; note = 2'-O-methyl guanosine
  modified_base 13: mod_base = OTHER; note = 2'-O-methyl cytidine
  modified_base 14: mod_base = OTHER; note = 2'-fluoro cytidine
  modified_base 15: mod_base = OTHER; note = 2'-O-methyl guanosine
  modified_base 16: mod_base = OTHER; note = 2'-fluoro uridine
  modified_base 17: mod_base = OTHER; note = 2'-O-methyl uridine
  modified_base 18: mod_base = OTHER; note = 2'-O-methyl uridine
  modified_base 22: mod_base = OTHER; note = 2'-O-methyl uridine
  modified_base 25: mod_base = OTHER; note = 2'-O-methyl guanosine
  modified_base 29: mod_base = OTHER; note = 2'-O-methyl uridine
  modified_base 30: mod_base = OTHER; note = 2'-O-methyl adenosine
  modified_base 31: mod_base = OTHER; note = 2'-O-methyl guanosine
  modified_base 32: mod_base = OTHER; note = 2'-O-methyl cytidine
  modified_base 33: mod_base = OTHER; note = Deoxythymidine phosphorothioate
  modified_base 35: mod_base = OTHER; note = Deoxycytidine phosphorothioate
  modified_base 37: mod_base = OTHER; note = Deoxythymidine phosphorothioate
  modified_base 38: mod_base = OTHER; note = 2'-O-methyl uridine
  modified_base 39: mod_base = OTHER; note = 2'-O-methyl uridine
  modified_base 40: mod_base = OTHER; note = 2'-O-methyl cytidine
  modified_base 41: mod_base = OTHER; note = 2'-O-methyl uridine
  modified_base 42: mod_base = OTHER; note = 2'-O-methyl cytidine
  modified_base 43: mod_base = OTHER; note = 2'-O-methyl adenosine
  modified_base 44: mod_base = OTHER; note = 2'-O-methyl uridine
  modified_base 45: mod_base = OTHER; note = 2'-O-methyl uridine phosphorothioate
  modified_base 46: mod_base = OTHER; note = 2'-O-methyl uridine phosphorothioate
  modified_base 47: mod_base = OTHER; note = 2'-O-methyl cytidine phosphorothioate
  modified_base 48: mod_base = OTHER; note = 2'-O-methyl guanosine
  misc_feature 1..6: note = RNA
  misc_feature 7: note = DNA
  misc_feature 8..32: note = RNA
  misc_feature 33: note = DNA
  misc_feature 34: note = RNA
  misc_feature 35: note = DNA
  misc_feature 36: note = RNA
  misc_feature 37: note = DNA
  misc_feature 38..48: note = RNA

SEQ ID NO: 360 - DNA, 48 bp, synthetic construct; identical to SEQ ID NO: 317
  source 1..48: mol_type = other DNA
  modified_base 1: mod_base = OTHER; note = 2'-O-methyl cytidine phosphorothioate
  modified_base 2: mod_base = OTHER; note = 2'-O-methyl uridine phosphorothioate
  modified_base 3: mod_base = OTHER; note = 2'-O-methyl guanosine phosphorothioate
  modified_base 4: mod_base = OTHER; note = 2'-O-methyl adenosine
  modified_base 5: mod_base = OTHER; note = 2'-O-methyl adenosine
  modified_base 6: mod_base = OTHER; note = 2'-O-methyl cytidine
  modified_base 7: mod_base = OTHER; note = Deoxythymidine phosphorothioate
  modified_base 8: mod_base = OTHER; note = 2'-O-methyl uridine
  modified_base 9: mod_base = OTHER; note = 2'-O-methyl guanosine
  modified_base 10: mod_base = OTHER; note = 2'-O-methyl uridine
  modified_base 11: mod_base = OTHER; note = 2'-O-methyl guanosine
  modified_base 12: mod_base = OTHER; note = 2'-O-methyl guanosine
  modified_base 13: mod_base = OTHER; note = 2'-O-methyl cytidine
  modified_base 14: mod_base = OTHER; note = 2'-fluoro cytidine
  modified_base 15: mod_base = OTHER; note = 2'-O-methyl guanosine
  modified_base 16: mod_base = OTHER; note = 2'-fluoro uridine
  modified_base 17: mod_base = OTHER; note = 2'-O-methyl uridine
  modified_base 18: mod_base = OTHER; note = 2'-O-methyl uridine
  modified_base 22: mod_base = OTHER; note = 2'-O-methyl uridine
  modified_base 25: mod_base = OTHER; note = 2'-O-methyl guanosine
  modified_base 26: mod_base = OTHER; note = Deoxythymidine phosphorothioate
  modified_base 29: mod_base = OTHER; note = 2'-O-methyl uridine
  modified_base 30: mod_base = OTHER; note = 2'-O-methyl adenosine
  modified_base 31: mod_base = OTHER; note = 2'-O-methyl guanosine
  modified_base 32: mod_base = OTHER; note = 2'-O-methyl cytidine
  modified_base 33: mod_base = OTHER; note = Deoxythymidine phosphorothioate
  modified_base 34: mod_base = OTHER; note = Deoxycytidine phosphorothioate
  modified_base 35: mod_base = OTHER; note = Deoxycytidine phosphorothioate
  modified_base 37: mod_base = OTHER; note = Deoxythymidine phosphorothioate
  modified_base 38: mod_base = OTHER; note = 2'-O-methyl uridine
  modified_base 39: mod_base = OTHER; note = 2'-O-methyl uridine
  modified_base 40: mod_base = OTHER; note = 2'-O-methyl cytidine
  modified_base 41: mod_base = OTHER; note = 2'-O-methyl uridine
  modified_base 42: mod_base = OTHER; note = 2'-O-methyl cytidine
  modified_base 43: mod_base = OTHER; note = 2'-O-methyl adenosine
  modified_base 44: mod_base = OTHER; note = 2'-O-methyl uridine
  modified_base 45: mod_base = OTHER; note = 2'-O-methyl uridine phosphorothioate
  modified_base 46: mod_base = OTHER; note = 2'-O-methyl uridine phosphorothioate
  modified_base 47: mod_base = OTHER; note = 2'-O-methyl cytidine phosphorothioate
  modified_base 48: mod_base = OTHER; note = 2'-O-methyl guanosine
  misc_feature 1..6: note = RNA
  misc_feature 7: note = DNA
  misc_feature 8..25: note = RNA
  misc_feature 26: note = DNA
  misc_feature 27..32: note = RNA
  misc_feature 33..35: note = DNA
  misc_feature 36: note = RNA
  misc_feature 37: note = DNA
  misc_feature 38..48: note = RNA

SEQ ID NO: 361 - DNA, 48 bp, synthetic construct; identical to SEQ ID NO: 317
  source 1..48: mol_type = other DNA
  modified_base 1: mod_base = OTHER; note = 2'-O-methyl cytidine phosphorothioate
  modified_base 2: mod_base = OTHER; note = 2'-O-methyl uridine phosphorothioate
  modified_base 3: mod_base = OTHER; note = 2'-O-methyl guanosine phosphorothioate
  modified_base 4: mod_base = OTHER; note = 2'-O-methyl adenosine
  modified_base 5: mod_base = OTHER; note = 2'-O-methyl adenosine
  modified_base 6: mod_base = OTHER; note = 2'-O-methyl cytidine
  modified_base 7: mod_base = OTHER; note = Deoxythymidine phosphorothioate
  modified_base 8: mod_base = OTHER; note = 2'-O-methyl uridine
  modified_base 9: mod_base = OTHER; note = 2'-O-methyl guanosine
  modified_base 10: mod_base = OTHER; note = 2'-O-methyl uridine
  modified_base 11: mod_base = OTHER; note = 2'-O-methyl guanosine
  modified_base 12: mod_base = OTHER; note = 2'-O-methyl guanosine
  modified_base 13: mod_base = OTHER; note = 2'-O-methyl cytidine
  modified_base 14: mod_base = OTHER; note = 2'-fluoro cytidine
  modified_base 15: mod_base = OTHER; note = 2'-O-methyl guanosine
  modified_base 16: mod_base = OTHER; note = 2'-fluoro uridine
  modified_base 17: mod_base = OTHER; note = 2'-O-methyl uridine
  modified_base 18: mod_base = OTHER; note = 2'-O-methyl uridine
  modified_base 22: mod_base = OTHER; note = 2'-O-methyl uridine
  modified_base 25: mod_base = OTHER; note = 2'-O-methyl guanosine
  modified_base 26: mod_base = OTHER; note = Deoxythymidine phosphorothioate
  modified_base 28: mod_base = OTHER; note = 2'-O-methyl guanosine
  modified_base 29: mod_base = OTHER; note = 2'-O-methyl uridine
  modified_base 30: mod_base = OTHER; note = 2'-O-methyl adenosine
  modified_base 31: mod_base = OTHER; note = 2'-O-methyl guanosine
  modified_base 32: mod_base = OTHER; note = 2'-O-methyl cytidine
  modified_base 33: mod_base = OTHER; note = Deoxythymidine phosphorothioate
  modified_base 35: mod_base = OTHER; note = 2'-O-methyl cytidine
  modified_base 37: mod_base = OTHER; note = Deoxythymidine phosphorothioate
  modified_base 38: mod_base = OTHER; note = 2'-O-methyl uridine
  modified_base 39: mod_base = OTHER; note = 2'-O-methyl uridine
  modified_base 40: mod_base = OTHER; note = 2'-O-methyl cytidine
  modified_base 41: mod_base = OTHER; note = 2'-O-methyl uridine
  modified_base 42: mod_base = OTHER; note = 2'-O-methyl cytidine
  modified_base 43: mod_base = OTHER; note = 2'-O-methyl adenosine
  modified_base 44: mod_base = OTHER; note = 2'-O-methyl uridine
  modified_base 45: mod_base = OTHER; note = 2'-O-methyl uridine phosphorothioate
  modified_base 46: mod_base = OTHER; note = 2'-O-methyl uridine phosphorothioate
  modified_base 47: mod_base = OTHER; note = 2'-O-methyl cytidine phosphorothioate
  modified_base 48: mod_base = OTHER; note = 2'-O-methyl guanosine
  misc_feature 1..6: note = RNA
  misc_feature 7: note = DNA
  misc_feature 8..25: note = RNA
  misc_feature 26: note = DNA
  misc_feature 27..32: note = RNA
  misc_feature 33: note = DNA
  misc_feature 34..36: note = RNA
  misc_feature 37: note = DNA
  misc_feature 38..48: note = RNA

SEQ ID NO: 362 - DNA, 48 bp, synthetic construct; identical to SEQ ID NO: 317
  source 1..48: mol_type = other DNA
  modified_base 1: mod_base = OTHER; note = 2'-O-methyl cytidine phosphorothioate
  modified_base 2: mod_base = OTHER; note = 2'-O-methyl uridine phosphorothioate
  modified_base 3: mod_base = OTHER; note = 2'-O-methyl guanosine phosphorothioate
  modified_base 4: mod_base = OTHER; note = 2'-O-methyl adenosine
  modified_base 5: mod_base = OTHER; note = 2'-O-methyl adenosine
  modified_base 6: mod_base = OTHER; note = 2'-O-methyl cytidine
  modified_base 7: mod_base = OTHER; note = Deoxythymidine phosphorothioate
  modified_base 8: mod_base = OTHER; note = 2'-O-methyl uridine
  modified_base 9: mod_base = OTHER; note = 2'-O-methyl guanosine
  modified_base 10: mod_base = OTHER; note = 2'-O-methyl uridine
  modified_base 11: mod_base = OTHER; note = 2'-O-methyl guanosine
  modified_base 12: mod_base = OTHER; note = 2'-O-methyl guanosine
  modified_base 13: mod_base = OTHER; note = 2'-O-methyl cytidine
  modified_base 14: mod_base = OTHER; note = 2'-fluoro cytidine
  modified_base 15: mod_base = OTHER; note = 2'-O-methyl guanosine
  modified_base 16: mod_base = OTHER; note = 2'-fluoro uridine
  modified_base 17: mod_base = OTHER; note = 2'-O-methyl uridine
  modified_base 18: mod_base = OTHER; note = 2'-O-methyl uridine
  modified_base 22: mod_base = OTHER; note = 2'-O-methyl uridine
  modified_base 25: mod_base = OTHER; note = 2'-O-methyl guanosine
  modified_base 26: mod_base = OTHER; note = Deoxythymidine phosphorothioate
  modified_base 28: mod_base = OTHER; note = 2'-O-methyl guanosine
  modified_base 29: mod_base = OTHER; note = 2'-O-methyl uridine
  modified_base 30: mod_base = OTHER; note = 2'-O-methyl adenosine
  modified_base 31: mod_base = OTHER; note = 2'-O-methyl guanosine
  modified_base 32: mod_base = OTHER; note = 2'-O-methyl cytidine
  modified_base 33: mod_base = OTHER; note = Deoxythymidine phosphorothioate
  modified_base 35: mod_base = OTHER; note = Deoxycytidine phosphorothioate
  modified_base 36: mod_base = OTHER; note = 2'-O-methyl cytidine
  modified_base 37: mod_base = OTHER; note = Deoxythymidine phosphorothioate
  modified_base 38: mod_base = OTHER; note = 2'-O-methyl uridine
  modified_base 39: mod_base = OTHER; note = 2'-O-methyl uridine
  modified_base 40: mod_base = OTHER; note = 2'-O-methyl cytidine
  modified_base 41: mod_base = OTHER; note = 2'-O-methyl uridine
  modified_base 42: mod_base = OTHER; note = 2'-O-methyl cytidine
  modified_base 43: mod_base = OTHER; note = 2'-O-methyl adenosine
  modified_base 44: mod_base = OTHER; note = 2'-O-methyl uridine
  modified_base 45: mod_base = OTHER; note = 2'-O-methyl uridine phosphorothioate
  modified_base 46: mod_base = OTHER; note = 2'-O-methyl uridine phosphorothioate
  modified_base 47: mod_base = OTHER; note = 2'-O-methyl cytidine phosphorothioate
  modified_base 48: mod_base = OTHER; note = 2'-O-methyl guanosine
  misc_feature 1..6: note = RNA
  misc_feature 7: note = DNA
  misc_feature 8..25: note = RNA
  misc_feature 26: note = DNA
  misc_feature 27..32: note = RNA
  misc_feature 33: note = DNA
  misc_feature 34: note = RNA
  misc_feature 35: note = DNA
  misc_feature 36: note = RNA
  misc_feature 37: note = DNA
  misc_feature 38..48: note = RNA

SEQ ID NO: 363 - DNA, 48 bp, synthetic construct; identical to SEQ ID NO: 317
  source 1..48: mol_type = other DNA
  modified_base 1: mod_base = OTHER; note = 2'-O-methyl cytidine phosphorothioate
  modified_base 2: mod_base = OTHER; note = 2'-O-methyl uridine phosphorothioate
  modified_base 3: mod_base = OTHER; note = 2'-O-methyl guanosine phosphorothioate
  modified_base 4: mod_base = OTHER; note = 2'-O-methyl adenosine
  modified_base 5: mod_base = OTHER; note = 2'-O-methyl adenosine
  modified_base 6: mod_base = OTHER; note = 2'-O-methyl cytidine
  modified_base 7: mod_base = OTHER; note = Deoxythymidine phosphorothioate
  modified_base 8: mod_base = OTHER; note = 2'-O-methyl uridine
  modified_base 9: mod_base = OTHER; note = 2'-O-methyl guanosine
  modified_base 10: mod_base = OTHER; note = 2'-O-methyl uridine
  modified_base 11: mod_base = OTHER; note = 2'-O-methyl guanosine
  modified_base 12: mod_base = OTHER; note = 2'-O-methyl guanosine
  modified_base 13: mod_base = OTHER; note = 2'-O-methyl cytidine
  modified_base 14: mod_base = OTHER; note = 2'-fluoro cytidine
  modified_base 15: mod_base = OTHER; note = 2'-O-methyl guanosine
  modified_base 16: mod_base = OTHER; note = 2'-fluoro uridine
  modified_base 17: mod_base = OTHER; note = 2'-O-methyl uridine
  modified_base 18: mod_base = OTHER; note = 2'-O-methyl uridine
  modified_base 22: mod_base = OTHER; note = 2'-O-methyl uridine
  modified_base 25: mod_base = OTHER; note = 2'-O-methyl guanosine
  modified_base 26: mod_base = OTHER; note = Deoxythymidine phosphorothioate
  modified_base 28: mod_base = OTHER; note = 2'-O-methyl guanosine
  modified_base 29: mod_base = OTHER; note = 2'-O-methyl uridine
  modified_base 30: mod_base = OTHER; note = 2'-O-methyl adenosine
  modified_base 31: mod_base = OTHER; note = 2'-O-methyl guanosine
  modified_base 32: mod_base = OTHER; note = 2'-O-methyl cytidine
  modified_base 33: mod_base = OTHER; note = Deoxythymidine phosphorothioate
  modified_base 35: mod_base = OTHER; note = 2'-O-methyl cytidine
  modified_base 36: mod_base = OTHER; note = 2'-O-methyl cytidine
  modified_base 37: mod_base = OTHER; note = Deoxythymidine phosphorothioate
  modified_base 38: mod_base = OTHER; note = 2'-O-methyl uridine
  modified_base 39: mod_base = OTHER; note = 2'-O-methyl uridine
  modified_base 40: mod_base = OTHER; note = 2'-O-methyl cytidine
  modified_base 41: mod_base = OTHER; note = 2'-O-methyl uridine
  modified_base 42: mod_base = OTHER; note = 2'-O-methyl cytidine
  modified_base 43: mod_base = OTHER; note = 2'-O-methyl adenosine
  modified_base 44: mod_base = OTHER; note = 2'-O-methyl uridine
  modified_base 45: mod_base = OTHER; note = 2'-O-methyl uridine phosphorothioate
  modified_base 46: mod_base = OTHER; note = 2'-O-methyl uridine phosphorothioate
  modified_base 47: mod_base = OTHER; note = 2'-O-methyl cytidine phosphorothioate
  modified_base 48: mod_base = OTHER; note = 2'-O-methyl guanosine
  misc_feature 1..6: note = RNA
  misc_feature 7: note = DNA
  misc_feature 8..25: note = RNA
  misc_feature 26: note = DNA
  misc_feature 27..32: note = RNA
  misc_feature 33: note = DNA
  misc_feature 34..36: note = RNA
  misc_feature 37: note = DNA
  misc_feature 38..48: note = RNA

SEQ ID NO: 364 - DNA, 48 bp, synthetic construct; identical to SEQ ID NO: 317
  source 1..48: mol_type = other DNA
  modified_base 1: mod_base = OTHER; note = 2'-O-methyl cytidine phosphorothioate
  modified_base 2: mod_base = OTHER; note = 2'-O-methyl uridine phosphorothioate
  modified_base 3: mod_base = OTHER; note = 2'-O-methyl guanosine phosphorothioate
  modified_base 4: mod_base = OTHER; note = 2'-O-methyl adenosine
  modified_base 5: mod_base = OTHER; note = 2'-O-methyl adenosine
  modified_base 6: mod_base = OTHER; note = 2'-O-methyl cytidine
  modified_base 7: mod_base = OTHER; note = Deoxythymidine phosphorothioate
  modified_base 8: mod_base = OTHER; note = 2'-O-methyl uridine
  modified_base 9: mod_base = OTHER; note = 2'-O-methyl guanosine
  modified_base 10: mod_base = OTHER; note = 2'-O-methyl uridine
  modified_base 11: mod_base = OTHER; note = 2'-O-methyl guanosine
  modified_base 12: mod_base = OTHER; note = 2'-O-methyl guanosine
  modified_base 13: mod_base = OTHER; note = 2'-O-methyl cytidine
  modified_base 14: mod_base = OTHER; note = 2'-fluoro cytidine
  modified_base 15: mod_base = OTHER; note = 2'-O-methyl guanosine
  modified_base 16: mod_base = OTHER; note = 2'-fluoro uridine
  modified_base 17: mod_base = OTHER; note = 2'-O-methyl uridine
  modified_base 18: mod_base = OTHER; note = 2'-O-methyl uridine
  modified_base 22: mod_base = OTHER; note = 2'-O-methyl uridine
  modified_base 25: mod_base = OTHER; note = 2'-O-methyl guanosine
  modified_base 26: mod_base = OTHER; note = Deoxythymidine phosphorothioate
  modified_base 28: mod_base = OTHER; note = 2'-O-methyl guanosine
  modified_base 29: mod_base = OTHER; note = 2'-O-methyl uridine
  modified_base 30: mod_base = OTHER; note = 2'-O-methyl adenosine
  modified_base 31: mod_base = OTHER; note = 2'-O-methyl guanosine
  modified_base 32: mod_base = OTHER; note = 2'-O-methyl cytidine
  modified_base 33: mod_base = OTHER; note = Deoxythymidine phosphorothioate
  modified_base 34: mod_base = OTHER; note = Deoxycytidine phosphorothioate
  modified_base 35: mod_base = OTHER; note = 2'-O-methyl cytidine
  modified_base 36: mod_base = OTHER; note = 2'-O-methyl cytidine
  modified_base 37: mod_base = OTHER; note = Deoxythymidine phosphorothioate
  modified_base 38: mod_base = OTHER; note = 2'-O-methyl uridine
  modified_base 39: mod_base = OTHER; note = 2'-O-methyl uridine
  modified_base 40: mod_base = OTHER; note = 2'-O-methyl cytidine
  modified_base 41: mod_base = OTHER; note = 2'-O-methyl uridine
  modified_base 42: mod_base = OTHER; note = 2'-O-methyl cytidine
  modified_base 43: mod_base = OTHER; note = 2'-O-methyl adenosine
  modified_base 44: mod_base = OTHER; note = 2'-O-methyl uridine
  modified_base 45: mod_base = OTHER; note = 2'-O-methyl uridine phosphorothioate
  modified_base 46: mod_base = OTHER; note = 2'-O-methyl uridine phosphorothioate
  modified_base 47: mod_base = OTHER; note = 2'-O-methyl cytidine phosphorothioate
  modified_base 48: mod_base = OTHER; note = 2'-O-methyl guanosine
  misc_feature 1..6: note = RNA
  misc_feature 7: note = DNA
  misc_feature 8..25: note = RNA
  misc_feature 26: note = DNA
  misc_feature 27..32: note = RNA
  misc_feature 33..34: note = DNA
  misc_feature 35..36: note = RNA
  misc_feature 37: note = DNA
  misc_feature 38..48: note = RNA

SEQ ID NO: 365 - DNA, 48 bp, synthetic construct; identical to SEQ ID NO: 317
  source 1..48: mol_type = other DNA
  modified_base 1: mod_base = OTHER; note = 2'-O-methyl cytidine phosphorothioate
  modified_base 2: mod_base = OTHER; note = 2'-O-methyl uridine phosphorothioate
  modified_base 3: mod_base = OTHER; note = 2'-O-methyl guanosine phosphorothioate
  modified_base 4: mod_base = OTHER; note = 2'-O-methyl adenosine
  modified_base 5: mod_base = OTHER; note = 2'-O-methyl adenosine
  modified_base 6: mod_base = OTHER; note = 2'-O-methyl cytidine
  modified_base 7: mod_base = OTHER; note = Deoxythymidine phosphorothioate
  modified_base 8: mod_base = OTHER; note = 2'-O-methyl uridine
  modified_base 9: mod_base = OTHER; note = 2'-O-methyl guanosine
  modified_base 10: mod_base = OTHER; note = 2'-O-methyl uridine
  modified_base 11: mod_base = OTHER; note = 2'-O-methyl guanosine
  modified_base 12: mod_base = OTHER; note = 2'-fluoro guanosine
  modified_base 13: mod_base = OTHER; note = 2'-O-methyl cytidine
  modified_base 14: mod_base = OTHER; note = 2'-fluoro cytidine
  modified_base 15: mod_base = OTHER; note = 2'-O-methyl guanosine
  modified_base 16: mod_base = OTHER; note = 2'-fluoro uridine
  modified_base 17: mod_base = OTHER; note = 2'-O-methyl uridine
  modified_base 18: mod_base = OTHER; note = 2'-O-methyl uridine
  modified_base 19: mod_base = OTHER; note = Adenosine phosphorothioate
  modified_base 20: mod_base = OTHER; note = 2'-fluoro cytidine
  modified_base 21: mod_base = OTHER; note = 2'-O-methyl guanosine
  modified_base 22: mod_base = OTHER; note = 2'-O-methyl uridine
  modified_base 23: mod_base = OTHER; note = 2'-O-methyl cytidine
  modified_base 24: mod_base = OTHER; note = 2'-O-methyl guanosine
  modified_base 25: mod_base = OTHER; note = 2'-O-methyl guanosine
  modified_base 26: mod_base = OTHER; note = Uridine phosphorothioate
  modified_base 28: mod_base = OTHER; note = 2'-O-methyl guanosine
  modified_base 29: mod_base = OTHER; note = 2'-O-methyl uridine
  modified_base 30: mod_base = OTHER; note = 2'-O-methyl adenosine
  modified_base 31: mod_base = OTHER; note = 2'-O-methyl guanosine
  modified_base 32: mod_base = OTHER; note = 2'-O-methyl cytidine
  modified_base 33: mod_base = OTHER; note = Uridine phosphorothioate
  modified_base 35: mod_base = OTHER; note = Cytidine phosphorothioate
  modified_base 37: mod_base = OTHER; note = Uridine phosphorothioate
  modified_base 38: mod_base = OTHER; note = 2'-O-methyl uridine
  modified_base 39: mod_base = OTHER; note = 2'-O-methyl uridine
  modified_base 40: mod_base = OTHER; note = 2'-O-methyl cytidine
  modified_base 41: mod_base = OTHER; note = 2'-O-methyl uridine
  modified_base 42: mod_base = OTHER; note = 2'-O-methyl cytidine
  modified_base 43: mod_base = OTHER; note = 2'-O-methyl adenosine
  modified_base 44: mod_base = OTHER; note = 2'-O-methyl uridine
  modified_base 45: mod_base = OTHER; note = 2'-O-methyl uridine phosphorothioate
  modified_base 46: mod_base = OTHER; note = 2'-O-methyl uridine phosphorothioate
  modified_base 47: mod_base = OTHER; note = 2'-O-methyl cytidine phosphorothioate
  modified_base 48: mod_base = OTHER; note = 2'-O-methyl guanosine
  misc_feature 1..6: note = RNA
  misc_feature 7: note = DNA
  misc_feature 8..48: note = RNA

SEQ ID NO: 366 - DNA, 48 bp, synthetic construct; identical to SEQ ID NO: 317
  source 1..48: mol_type = other DNA
  modified_base 1: mod_base = OTHER; note = 2'-O-methyl cytidine phosphorothioate
  modified_base 2: mod_base = OTHER; note = 2'-O-methyl uridine phosphorothioate
  modified_base 3: mod_base = OTHER; note = 2'-O-methyl guanosine phosphorothioate
  modified_base 4: mod_base = OTHER; note = 2'-O-methyl adenosine
  modified_base 5: mod_base = OTHER; note = 2'-O-methyl adenosine
  modified_base 6: mod_base = OTHER; note = 2'-O-methyl cytidine
  modified_base 7: mod_base = OTHER; note = Deoxythymidine phosphorothioate
  modified_base 8: mod_base = OTHER; note = 2'-O-methyl uridine
  modified_base 9: mod_base = OTHER; note = 2'-O-methyl guanosine
  modified_base 10: mod_base = OTHER; note = 2'-O-methyl uridine
  modified_base 11: mod_base = OTHER; note = 2'-O-methyl guanosine
  modified_base 12: mod_base = OTHER; note = 2'-fluoro guanosine
  modified_base 13: mod_base = OTHER; note = 2'-O-methyl cytidine
  modified_base 14: mod_base = OTHER; note = 2'-fluoro cytidine
  modified_base 15: mod_base = OTHER; note = 2'-O-methyl guanosine
  modified_base 16: mod_base = OTHER; note = 2'-fluoro uridine
  modified_base 17: mod_base = OTHER; note = 2'-O-methyl uridine
  modified_base 18: mod_base = OTHER; note = 2'-O-methyl uridine
  modified_base 19: mod_base = OTHER; note = Adenosine phosphorothioate
  modified_base 20: mod_base = OTHER; note = 2'-O-methyl cytidine
  modified_base 21: mod_base = OTHER; note = 2'-fluoro guanosine
  modified_base 22: mod_base = OTHER; note = 2'-O-methyl uridine
  modified_base 23: mod_base = OTHER; note = 2'-O-methyl cytidine
  modified_base 24: mod_base = OTHER; note = 2'-O-methyl guanosine
  modified_base 25: mod_base = OTHER; note = 2'-O-methyl guanosine
  modified_base 26: mod_base = OTHER; note = Uridine phosphorothioate
  modified_base 28: mod_base = OTHER; note = 2'-O-methyl guanosine
  modified_base 29: mod_base = OTHER; note = 2'-O-methyl uridine
  modified_base 30: mod_base = OTHER; note = 2'-O-methyl adenosine
  modified_base 31: mod_base = OTHER; note = 2'-O-methyl guanosine
  modified_base 32: mod_base = OTHER; note = 2'-O-methyl cytidine
  modified_base 33: mod_base = OTHER; note = Uridine phosphorothioate
  modified_base 35: mod_base = OTHER; note = Cytidine phosphorothioate
  modified_base 37: mod_base = OTHER; note = Uridine phosphorothioate
  modified_base 38: mod_base = OTHER; note = 2'-O-methyl uridine
  modified_base 39: mod_base = OTHER; note = 2'-O-methyl uridine
  modified_base 40: mod_base = OTHER; note = 2'-O-methyl cytidine
  modified_base 41: mod_base = OTHER; note = 2'-O-methyl uridine
  modified_base 42: mod_base = OTHER; note = 2'-O-methyl cytidine
  modified_base 43: mod_base = OTHER; note = 2'-O-methyl adenosine
  modified_base 44: mod_base = OTHER; note = 2'-O-methyl uridine
  modified_base 45: mod_base = OTHER; note = 2'-O-methyl uridine phosphorothioate
  modified_base 46: mod_base = OTHER; note = 2'-O-methyl uridine phosphorothioate
  modified_base 47: mod_base = OTHER; note = 2'-O-methyl cytidine phosphorothioate
  modified_base 48: mod_base = OTHER; note = 2'-O-methyl guanosine
  misc_feature 1..6: note = RNA
  misc_feature 7: note = DNA
  misc_feature 8..48: note = RNA

SEQ ID NO: 367 - DNA, 48 bp, synthetic construct; identical to SEQ ID NO: 317
  source 1..48: mol_type = other DNA
  modified_base 1: mod_base = OTHER; note = 2'-O-methyl cytidine phosphorothioate
  modified_base 2: mod_base = OTHER; note = 2'-O-methyl uridine phosphorothioate
  modified_base 3: mod_base = OTHER; note = 2'-O-methyl guanosine phosphorothioate
  modified_base 4: mod_base = OTHER; note = 2'-O-methyl adenosine
  modified_base 5: mod_base = OTHER; note = 2'-O-methyl adenosine
  modified_base 6: mod_base = OTHER; note = 2'-O-methyl cytidine
  modified_base 7: mod_base = OTHER; note = Deoxythymidine phosphorothioate
  modified_base 8: mod_base = OTHER; note = 2'-O-methyl uridine
  modified_base 9: mod_base = OTHER; note = 2'-O-methyl guanosine
  modified_base 10: mod_base = OTHER; note = 2'-O-methyl uridine
  modified_base 11: mod_base = OTHER; note = 2'-O-methyl guanosine
  modified_base 12: mod_base = OTHER; note = 2'-O-methyl guanosine
  modified_base 13: mod_base = OTHER; note = 2'-O-methyl cytidine
  modified_base 14: mod_base = OTHER; note = 2'-fluoro cytidine
  modified_base 15: mod_base = OTHER; note = 2'-O-methyl guanosine
  modified_base 16: mod_base = OTHER; note = 2'-fluoro uridine
  modified_base 17: mod_base = OTHER; note = 2'-O-methyl uridine
  modified_base 18: mod_base = OTHER; note = 2'-O-methyl uridine
  modified_base 19: mod_base = OTHER; note = Adenosine phosphorothioate
  modified_base 20: mod_base = OTHER; note = 2'-fluoro cytidine
  modified_base 21: mod_base = OTHER; note = 2'-O-methyl guanosine
  modified_base 22: mod_base = OTHER; note = 2'-O-methyl uridine
  modified_base 23: mod_base = OTHER; note = 2'-O-methyl cytidine
  modified_base 24: mod_base = OTHER; note = 2'-O-methyl guanosine
  modified_base 25: mod_base = OTHER; note = 2'-O-methyl guanosine
  modified_base 26: mod_base = OTHER; note = Uridine phosphorothioate
  modified_base 28: mod_base = OTHER; note = 2'-O-methyl guanosine
  modified_base 29: mod_base = OTHER; note = 2'-O-methyl uridine
  modified_base 30: mod_base = OTHER; note = 2'-O-methyl adenosine
  modified_base 31: mod_base = OTHER; note = 2'-O-methyl guanosine
  modified_base 32: mod_base = OTHER; note = 2'-O-methyl cytidine
  modified_base 33: mod_base = OTHER; note = Uridine phosphorothioate
  modified_base 35: mod_base = OTHER; note = Cytidine phosphorothioate
  modified_base 37: mod_base = OTHER; note = Uridine phosphorothioate
  modified_base 38: mod_base = OTHER; note = 2'-O-methyl uridine
  modified_base 39: mod_base = OTHER; note = 2'-O-methyl uridine
  modified_base 40: mod_base = OTHER; note = 2'-O-methyl cytidine
  modified_base 41: mod_base = OTHER; note = 2'-O-methyl uridine
  modified_base 42: mod_base = OTHER; note = 2'-O-methyl cytidine
  modified_base 43: mod_base = OTHER; note = 2'-O-methyl adenosine
  modified_base 44: mod_base = OTHER; note = 2'-O-methyl uridine
  modified_base 45: mod_base = OTHER; note = 2'-O-methyl uridine phosphorothioate
  modified_base 46: mod_base = OTHER; note = 2'-O-methyl uridine phosphorothioate
  modified_base 47: mod_base = OTHER; note = 2'-O-methyl cytidine phosphorothioate
  modified_base 48: mod_base = OTHER; note = 2'-O-methyl guanosine
  misc_feature 1..6: note = RNA
  misc_feature 7: note = DNA
  misc_feature 8..48: note = RNA

SEQ ID NO: 368 - DNA, 48 bp, synthetic construct; identical to SEQ ID NO: 317
  source 1..48: mol_type = other DNA
  modified_base 1: mod_base = OTHER; note = 2'-O-methyl cytidine phosphorothioate
  modified_base 2: mod_base = OTHER; note = 2'-O-methyl uridine phosphorothioate
  modified_base 3: mod_base = OTHER; note = 2'-O-methyl guanosine phosphorothioate
  modified_base 4: mod_base = OTHER; note = 2'-O-methyl adenosine
  modified_base 5: mod_base = OTHER; note = 2'-O-methyl adenosine
  modified_base 6: mod_base = OTHER; note = 2'-O-methyl cytidine
  modified_base 7: mod_base = OTHER; note = Deoxythymidine phosphorothioate
  modified_base 8: mod_base = OTHER; note = 2'-O-methyl uridine
  modified_base 9: mod_base = OTHER; note = 2'-O-methyl guanosine
  modified_base 10: mod_base = OTHER; note = 2'-O-methyl uridine
  modified_base 11: mod_base = OTHER; note = 2'-O-methyl guanosine
  modified_base 12: mod_base = OTHER; note = 2'-O-methyl guanosine
  modified_base 13: mod_base = OTHER; note = 2'-O-methyl cytidine
  modified_base 14: mod_base = OTHER; note = 2'-fluoro cytidine
  modified_base 15: mod_base = OTHER; note = 2'-O-methyl guanosine
  modified_base 16: mod_base = OTHER; note = 2'-fluoro uridine
  modified_base 17: mod_base = OTHER; note = 2'-O-methyl uridine
  modified_base 18: mod_base = OTHER; note = 2'-O-methyl uridine
  modified_base 19: mod_base = OTHER; note = Adenosine phosphorothioate
  modified_base 20: mod_base = OTHER; note = 2'-O-methyl cytidine
  modified_base 21: mod_base = OTHER; note = 2'-fluoro guanosine
  modified_base 22: mod_base = OTHER; note = 2'-O-methyl uridine
  modified_base 23: mod_base = OTHER; note = 2'-O-methyl cytidine
  modified_base 24: mod_base = OTHER; note = 2'-O-methyl guanosine
  modified_base 25: mod_base = OTHER; note = 2'-O-methyl guanosine
  modified_base 26: mod_base = OTHER; note = Uridine phosphorothioate
  modified_base 28: mod_base = OTHER; note = 2'-O-methyl guanosine
  modified_base 29: mod_base = OTHER; note = 2'-O-methyl uridine
  modified_base 30: mod_base = OTHER; note = 2'-O-methyl adenosine
  modified_base 31: mod_base = OTHER; note = 2'-O-methyl guanosine
  modified_base 32: mod_base = OTHER; note = 2'-O-methyl cytidine
  modified_base 33: mod_base = OTHER; note = Uridine phosphorothioate
  modified_base 35: mod_base = OTHER; note = Cytidine phosphorothioate
  modified_base 37: mod_base = OTHER; note = Uridine phosphorothioate
  modified_base 38: mod_base = OTHER; note = 2'-O-methyl uridine
  modified_base 39: mod_base = OTHER; note = 2'-O-methyl uridine
  modified_base 40: mod_base = OTHER; note = 2'-O-methyl cytidine
  modified_base 41: mod_base = OTHER; note = 2'-O-methyl uridine
  modified_base 42: mod_base = OTHER; note = 2'-O-methyl cytidine
  modified_base 43: mod_base = OTHER; note = 2'-O-methyl adenosine
  modified_base 44: mod_base = OTHER; note = 2'-O-methyl uridine
  modified_base 45: mod_base = OTHER; note = 2'-O-methyl uridine phosphorothioate
  modified_base 46: mod_base = OTHER; note = 2'-O-methyl uridine phosphorothioate
  modified_base 47: mod_base = OTHER; note = 2'-O-methyl cytidine phosphorothioate
  modified_base 48: mod_base = OTHER; note = 2'-O-methyl guanosine
  misc_feature 1..6: note = RNA
  misc_feature 7: note = DNA
  misc_feature 8..48: note = RNA

SEQ ID NO: 369 - DNA, 48 bp, synthetic construct; identical to SEQ ID NO: 317
  source 1..48: mol_type = other DNA
  modified_base 1: mod_base = OTHER; note = 2'-O-methyl cytidine phosphorothioate
  modified_base 2: mod_base = OTHER; note = 2'-O-methyl uridine phosphorothioate
  modified_base 3: mod_base = OTHER; note = 2'-O-methyl guanosine phosphorothioate
  modified_base 4: mod_base = OTHER; note = 2'-O-methyl adenosine
  modified_base 5: mod_base = OTHER; note = 2'-O-methyl adenosine
  modified_base 6: mod_base = OTHER; note = 2'-O-methyl cytidine
  modified_base 7: mod_base = OTHER; note = Deoxythymidine phosphorothioate
  modified_base 8: mod_base = OTHER; note = 2'-O-methyl uridine
  modified_base 9: mod_base = OTHER; note = 2'-O-methyl guanosine
  modified_base 10: mod_base = OTHER; note = 2'-O-methyl uridine
  modified_base 11: mod_base = OTHER; note = 2'-O-methyl guanosine
  modified_base 12: mod_base = OTHER; note = 2'-fluoro guanosine
  modified_base 13: mod_base = OTHER; note = 2'-O-methyl cytidine
  modified_base 14: mod_base = OTHER; note = 2'-fluoro cytidine
  modified_base 15: mod_base = OTHER; note = 2'-O-methyl guanosine
  modified_base 16: mod_base = OTHER; note = 2'-fluoro uridine
  modified_base 17: mod_base = OTHER; note = 2'-O-methyl uridine
  modified_base 18: mod_base = OTHER; note = 2'-O-methyl uridine
  modified_base 19: mod_base = OTHER; note = Adenosine phosphorothioate
  modified_base 20: mod_base = OTHER; note = 2'-fluoro cytidine
  modified_base 21: mod_base = OTHER; note = 2'-O-methyl guanosine
  modified_base 22: mod_base = OTHER; note = 2'-O-methyl uridine
  modified_base 23: mod_base = OTHER; note = 2'-O-methyl cytidine
  modified_base 24: mod_base = OTHER; note = 2'-O-methyl guanosine
  modified_base 25: mod_base = OTHER; note = 2'-O-methyl guanosine
  modified_base 26: mod_base = OTHER; note = Uridine phosphorothioate
  modified_base 28: mod_base = OTHER; note = 2'-O-methyl guanosine
  modified_base 29: mod_base = OTHER; note = 2'-O-methyl uridine
  modified_base 30: mod_base = OTHER; note = 2'-O-methyl adenosine
  modified_base 31: mod_base = OTHER; note = 2'-O-methyl guanosine
  modified_base 32: mod_base = OTHER; note = 2'-O-methyl cytidine
  modified_base 33: mod_base = OTHER; note = Uridine phosphorothioate
  modified_base 35: mod_base = OTHER; note = 2'-O-methyl cytidine
  modified_base 37: mod_base = OTHER; note = Uridine phosphorothioate
  modified_base 38: mod_base = OTHER; note = 2'-O-methyl uridine
  modified_base 39: mod_base = OTHER; note = 2'-O-methyl uridine
  modified_base 40: mod_base = OTHER; note = 2'-O-methyl cytidine
  modified_base 41: mod_base = OTHER; note = 2'-O-methyl uridine
  modified_base 42: mod_base = OTHER; note = 2'-O-methyl cytidine
  modified_base 43: mod_base = OTHER; note = 2'-O-methyl adenosine
  modified_base 44: mod_base = OTHER; note = 2'-O-methyl uridine
  modified_base 45: mod_base = OTHER; note = 2'-O-methyl uridine phosphorothioate
  modified_base 46: mod_base = OTHER; note = 2'-O-methyl uridine phosphorothioate
  modified_base 47: mod_base = OTHER; note = 2'-O-methyl cytidine phosphorothioate
  modified_base 48: mod_base = OTHER; note = 2'-O-methyl guanosine
  misc_feature 1..6: note = RNA
  misc_feature 7: note = DNA
  misc_feature 8..48: note = RNA

SEQ ID NO: 370 - DNA, 48 bp, synthetic construct; identical to SEQ ID NO: 317
  source 1..48: mol_type = other DNA
  modified_base 1: mod_base = OTHER; note = 2'-O-methyl cytidine phosphorothioate
  modified_base 2: mod_base = OTHER; note = 2'-O-methyl uridine phosphorothioate
  modified_base 3: mod_base = OTHER; note = 2'-O-methyl guanosine phosphorothioate
  modified_base 4: mod_base = OTHER; note = 2'-O-methyl adenosine
  modified_base 5: mod_base = OTHER; note = 2'-O-methyl adenosine
  modified_base 6: mod_base = OTHER; note = 2'-O-methyl cytidine
  modified_base 7: mod_base = OTHER; note = Deoxythymidine phosphorothioate
  modified_base 8: mod_base = OTHER; note = 2'-O-methyl uridine
  modified_base 9: mod_base = OTHER; note = 2'-O-methyl guanosine
  modified_base 10: mod_base = OTHER; note = 2'-O-methyl uridine
  modified_base 11: mod_base = OTHER; note = 2'-O-methyl guanosine
  modified_base 12: mod_base = OTHER; note = 2'-fluoro guanosine
  modified_base 13: mod_base = OTHER; note = 2'-O-methyl cytidine
  modified_base 14: mod_base = OTHER; note = 2'-fluoro cytidine
  modified_base 15: mod_base = OTHER; note = 2'-O-methyl guanosine
  modified_base 16: mod_base = OTHER; note = 2'-fluoro uridine
  modified_base 17: mod_base = OTHER; note = 2'-O-methyl uridine
  modified_base 18: mod_base = OTHER; note = 2'-O-methyl uridine
  modified_base 19: mod_base = OTHER; note = Adenosine phosphorothioate
  modified_base 20: mod_base = OTHER; note = 2'-O-methyl cytidine
  modified_base 21: mod_base = OTHER; note = 2'-fluoro guanosine
  modified_base 22: mod_base = OTHER; note = 2'-O-methyl uridine
  modified_base 23: mod_base = OTHER; note = 2'-O-methyl cytidine
  modified_base 24: mod_base = OTHER; note = 2'-O-methyl guanosine
  modified_base 25: mod_base = OTHER; note = 2'-O-methyl guanosine
  modified_base 26: mod_base = OTHER; note = Uridine phosphorothioate
  modified_base 28: mod_base = OTHER; note = 2'-O-methyl guanosine
  modified_base 29: mod_base = OTHER; note = 2'-O-methyl uridine
  modified_base 30: mod_base = OTHER; note = 2'-O-methyl adenosine
  modified_base 31: mod_base = OTHER; note = 2'-O-methyl guanosine
  modified_base 32: mod_base = OTHER; note = 2'-O-methyl cytidine
  modified_base 33: mod_base = OTHER; note = Uridine phosphorothioate
  modified_base 35: mod_base = OTHER; note = 2'-O-methyl cytidine
  modified_base 37: mod_base = OTHER; note = Uridine phosphorothioate
  modified_base 38: mod_base = OTHER; note = 2'-O-methyl uridine
  modified_base 39: mod_base = OTHER; note = 2'-O-methyl uridine
  modified_base 40: mod_base = OTHER; note = 2'-O-methyl cytidine
  modified_base 41: mod_base = OTHER; note = 2'-O-methyl uridine
  modified_base 42: mod_base = OTHER; note = 2'-O-methyl cytidine
  modified_base 43: mod_base = OTHER; note = 2'-O-methyl adenosine
  modified_base 44: mod_base = OTHER; note = 2'-O-methyl uridine
  modified_base 45: mod_base = OTHER; note = 2'-O-methyl uridine phosphorothioate
  modified_base 46: mod_base = OTHER; note = 2'-O-methyl uridine phosphorothioate
  modified_base 47: mod_base = OTHER; note = 2'-O-methyl cytidine phosphorothioate
  modified_base 48: mod_base = OTHER; note = 2'-O-methyl guanosine
  misc_feature 1..6: note = RNA
  misc_feature 7: note = DNA
  misc_feature 8..48: note = RNA

SEQ ID NO: 371 - DNA, 48 bp, synthetic construct; identical to SEQ ID NO: 317
  source 1..48: mol_type = other DNA
  modified_base 1: mod_base = OTHER; note = 2'-O-methyl cytidine phosphorothioate
  modified_base 2: mod_base = OTHER; note = 2'-O-methyl uridine phosphorothioate
  modified_base 3: mod_base = OTHER; note = 2'-O-methyl guanosine phosphorothioate
  modified_base 4: mod_base = OTHER; note = 2'-O-methyl adenosine
  modified_base 5: mod_base = OTHER; note = 2'-O-methyl adenosine
  modified_base 6: mod_base = OTHER; note = 2'-O-methyl cytidine
  modified_base 7: mod_base = OTHER; note = Deoxythymidine phosphorothioate
  modified_base 8: mod_base = OTHER; note = 2'-O-methyl uridine
  modified_base 9: mod_base = OTHER; note = 2'-O-methyl guanosine
  modified_base 10: mod_base = OTHER; note = 2'-O-methyl uridine
  modified_base 11: mod_base = OTHER; note = 2'-O-methyl guanosine
  modified_base 12: mod_base = OTHER; note = 2'-O-methyl guanosine
  modified_base 13: mod_base = OTHER; note = 2'-O-methyl cytidine
  modified_base 14: mod_base = OTHER; note = 2'-fluoro cytidine
  modified_base 15: mod_base = OTHER; note = 2'-O-methyl guanosine
  modified_base 16: mod_base = OTHER; note = 2'-fluoro uridine
  modified_base 17: mod_base = OTHER; note = 2'-O-methyl uridine
  modified_base 18: mod_base = OTHER; note = 2'-O-methyl uridine
  modified_base 19: mod_base = OTHER; note = Adenosine phosphorothioate
  modified_base 20: mod_base = OTHER; note = 2'-fluoro cytidine
  modified_base 21: mod_base = OTHER; note = 2'-O-methyl guanosine
  modified_base 22: mod_base = OTHER; note = 2'-O-methyl uridine
  modified_base 23: mod_base = OTHER; note = 2'-O-methyl cytidine
  modified_base 24: mod_base = OTHER; note = 2'-O-methyl guanosine
  modified_base 25: mod_base = OTHER; note = 2'-O-methyl guanosine
  modified_base 26: mod_base = OTHER; note = Uridine phosphorothioate
  modified_base 28: mod_base = OTHER; note = 2'-O-methyl guanosine
  modified_base 29: mod_base = OTHER; note = 2'-O-methyl uridine
  modified_base 30: mod_base = OTHER; note = 2'-O-methyl adenosine
  modified_base 31: mod_base = OTHER; note = 2'-O-methyl guanosine
  modified_base 32: mod_base = OTHER; note = 2'-O-methyl cytidine
  modified_base 33: mod_base = OTHER; note = Uridine phosphorothioate
  modified_base 35: mod_base = OTHER; note = 2'-O-methyl cytidine
  modified_base 37: mod_base = OTHER; note = Uridine phosphorothioate
  modified_base 38: mod_base = OTHER; note = 2'-O-methyl uridine
  modified_base 39: mod_base = OTHER; note = 2'-O-methyl uridine
  modified_base 40: mod_base = OTHER; note = 2'-O-methyl cytidine
  modified_base 41: mod_base = OTHER; note = 2'-O-methyl uridine
  modified_base 42: mod_base = OTHER; note = 2'-O-methyl cytidine
  modified_base 43: mod_base = OTHER; note = 2'-O-methyl adenosine
  modified_base 44: mod_base = OTHER; note = 2'-O-methyl uridine
  modified_base 45: mod_base = OTHER; note = 2'-O-methyl uridine phosphorothioate
  modified_base 46: mod_base = OTHER; note = 2'-O-methyl uridine phosphorothioate
  modified_base 47: mod_base = OTHER; note = 2'-O-methyl cytidine phosphorothioate
  modified_base 48: mod_base = OTHER; note = 2'-O-methyl guanosine
  misc_feature 1..6: note = RNA
  misc_feature 7: note = DNA
  misc_feature 8..48: note = RNA

SEQ ID NO: 372 - DNA, 48 bp, synthetic construct; identical to SEQ ID NO: 317
  source 1..48: mol_type = other DNA
  modified_base 1: mod_base = OTHER; note = 2'-O-methyl cytidine phosphorothioate
  modified_base 2: mod_base = OTHER; note = 2'-O-methyl uridine phosphorothioate
  modified_base 3: mod_base = OTHER; note = 2'-O-methyl guanosine phosphorothioate
  modified_base 4: mod_base = OTHER; note = 2'-O-methyl adenosine
  modified_base 5: mod_base = OTHER; note = 2'-O-methyl adenosine
  modified_base 6: mod_base = OTHER; note = 2'-O-methyl cytidine
  modified_base 7: mod_base = OTHER; note = Deoxythymidine phosphorothioate
  modified_base 8: mod_base = OTHER; note = 2'-O-methyl uridine
  modified_base 9: mod_base = OTHER; note = 2'-O-methyl guanosine
  modified_base 10: mod_base = OTHER; note = 2'-O-methyl uridine
  modified_base 11: mod_base = OTHER; note = 2'-O-methyl guanosine
  modified_base 12: mod_base = OTHER; note = 2'-O-methyl guanosine
  modified_base 13: mod_base = OTHER; note = 2'-O-methyl cytidine
  modified_base 14: mod_base = OTHER; note = 2'-fluoro cytidine
  modified_base 15: mod_base = OTHER; note = 2'-O-methyl guanosine
  modified_base 16: mod_base = OTHER; note = 2'-fluoro uridine
  modified_base 17: mod_base = OTHER; note = 2'-O-methyl uridine
  modified_base 18: mod_base = OTHER; note = 2'-O-methyl uridine
  modified_base 19: mod_base = OTHER; note = Adenosine phosphorothioate
  modified_base 20: mod_base = OTHER; note = 2'-O-methyl cytidine
  modified_base 21: mod_base = OTHER; note = 2'-fluoro guanosine
  modified_base 22: mod_base = OTHER; note = 2'-O-methyl uridine
  modified_base 23: mod_base = OTHER; note = 2'-O-methyl cytidine
  modified_base 24: mod_base = OTHER; note = 2'-O-methyl guanosine
  modified_base 25: mod_base = OTHER; note = 2'-O-methyl guanosine
  modified_base 26: mod_base = OTHER; note = Uridine phosphorothioate
  modified_base 28: mod_base = OTHER; note = 2'-O-methyl guanosine
  modified_base 29: mod_base = OTHER; note = 2'-O-methyl uridine
  modified_base 30: mod_base = OTHER; note = 2'-O-methyl adenosine
  modified_base 31: mod_base = OTHER; note = 2'-O-methyl guanosine
  modified_base 32: mod_base = OTHER; note = 2'-O-methyl cytidine
  modified_base 33: mod_base = OTHER; note = Uridine phosphorothioate
  modified_base 35: mod_base = OTHER; note = 2'-O-methyl cytidine
  modified_base 37: mod_base = OTHER; note = Uridine phosphorothioate
  modified_base 38: mod_base = OTHER; note = 2'-O-methyl uridine
  modified_base 39: mod_base = OTHER; note = 2'-O-methyl uridine
  modified_base 40: mod_base = OTHER; note = 2'-O-methyl cytidine
  modified_base 41: mod_base = OTHER; note = 2'-O-methyl uridine
  modified_base 42: mod_base = OTHER; note = 2'-O-methyl cytidine
  modified_base 43: mod_base = OTHER; note = 2'-O-methyl adenosine
  modified_base 44: mod_base = OTHER; note = 2'-O-methyl uridine
  modified_base 45: mod_base = OTHER; note = 2'-O-methyl uridine phosphorothioate
  modified_base 46: mod_base = OTHER; note = 2'-O-methyl uridine phosphorothioate
  modified_base 47: mod_base = OTHER; note = 2'-O-methyl cytidine phosphorothioate
  modified_base 48: mod_base = OTHER; note = 2'-O-methyl guanosine
  misc_feature 1..6: note = RNA
  misc_feature 7: note = DNA
  misc_feature 8..48: note = RNA

SEQ ID NO: 373 - DNA, 48 bp, synthetic construct; identical to SEQ ID NO: 317
  source 1..48: mol_type = other DNA
  modified_base 1: mod_base = OTHER; note = 2'-O-methyl cytidine phosphorothioate
  modified_base 2: mod_base = OTHER; note = 2'-O-methyl uridine phosphorothioate
  modified_base 3: mod_base = OTHER; note = 2'-O-methyl guanosine phosphorothioate
  modified_base 4: mod_base = OTHER; note = 2'-O-methyl adenosine
  modified_base 5: mod_base = OTHER; note = 2'-O-methyl adenosine
  modified_base 6: mod_base = OTHER; note = 2'-O-methyl cytidine
  modified_base 7: mod_base = OTHER; note = Deoxythymidine phosphorothioate
  modified_base 8: mod_base = OTHER; note = 2'-O-methyl uridine
  modified_base 9: mod_base = OTHER; note = 2'-O-methyl guanosine
  modified_base 10: mod_base = OTHER; note = 2'-O-methyl uridine
  modified_base 11: mod_base = OTHER; note = 2'-O-methyl guanosine
  modified_base 12: mod_base = OTHER; note = 2'-O-methyl guanosine
  modified_base 13: mod_base = OTHER; note = 2'-O-methyl cytidine
  modified_base 14: mod_base = OTHER; note = 2'-fluoro cytidine
  modified_base 15: mod_base = OTHER; note = 2'-O-methyl guanosine
  modified_base 16: mod_base = OTHER; note = 2'-fluoro uridine
  modified_base 17: mod_base = OTHER; note = 2'-O-methyl uridine
  modified_base 18: mod_base = OTHER; note = 2'-O-methyl uridine
  modified_base 19: mod_base = OTHER; note = Adenosine phosphorothioate
  modified_base 20: mod_base = OTHER; note = 2'-O-methyl cytidine
  modified_base 21: mod_base = OTHER; note = 2'-fluoro guanosine
  modified_base 22: mod_base = OTHER; note = 2'-O-methyl uridine
  modified_base 23: mod_base = OTHER; note = 2'-O-methyl cytidine
  modified_base 24: mod_base = OTHER; note = 2'-O-methyl guanosine
  modified_base 25: mod_base = OTHER; note = 2'-O-methyl guanosine
  modified_base 26: mod_base = OTHER; note = Uridine phosphorothioate
  modified_base 27: mod_base = OTHER; note = Uridine phosphorothioate
  modified_base 28: mod_base = OTHER; note = 2'-O-methyl guanosine
  modified_base 29: mod_base = OTHER; note = 2'-O-methyl uridine
  modified_base 30: mod_base = OTHER; note = 2'-O-methyl adenosine
  modified_base 31: mod_base = OTHER; note = 2'-O-methyl guanosine
  modified_base 32: mod_base = OTHER; note = 2'-O-methyl cytidine
  modified_base 33: mod_base = OTHER; note = Uridine phosphorothioate
  modified_base 34: mod_base = OTHER; note = Cytidine phosphorothioate
  modified_base 35: mod_base = OTHER; note = 2'-O-methyl cytidine
  modified_base 36: mod_base = OTHER; note = Cytidine phosphorothioate
  modified_base 37: mod_base = OTHER; note = Uridine phosphorothioate
  modified_base 38: mod_base = OTHER; note = 2'-O-methyl uridine
  modified_base 39: mod_base = OTHER; note = 2'-O-methyl uridine
  modified_base 40: mod_base = OTHER; note = 2'-O-methyl cytidine
  modified_base 41: mod_base = OTHER; note = 2'-O-methyl uridine
  modified_base 42: mod_base = OTHER; note = 2'-O-methyl cytidine
  modified_base 43: mod_base = OTHER; note = 2'-O-methyl adenosine
  modified_base 44: mod_base = OTHER; note = 2'-O-methyl uridine
  modified_base 45: mod_base = OTHER; note = 2'-O-methyl uridine phosphorothioate
  modified_base 46: mod_base = OTHER; note = 2'-O-methyl uridine phosphorothioate
  modified_base 47: mod_base = OTHER; note = 2'-O-methyl cytidine phosphorothioate
  modified_base 48: mod_base = OTHER; note = 2'-O-methyl guanosine
  misc_feature 1..6: note = RNA
  misc_feature 7: note = DNA
  misc_feature 8..48: note = RNA

SEQ ID NO: 374 - DNA, 48 bp, synthetic construct; identical to SEQ ID NO: 317
  source 1..48: mol_type = other DNA
  modified_base 1: mod_base = OTHER; note = 2'-O-methyl cytidine phosphorothioate
  modified_base 2: mod_base = OTHER; note = 2'-O-methyl uridine phosphorothioate
  modified_base 3: mod_base = OTHER; note = 2'-O-methyl guanosine phosphorothioate
  modified_base 4: mod_base = OTHER; note = 2'-O-methyl adenosine
  modified_base 5: mod_base = OTHER; note = 2'-O-methyl adenosine
  modified_base 6: mod_base = OTHER; note = 2'-O-methyl cytidine
  modified_base 7: mod_base = OTHER; note = Deoxythymidine phosphorothioate
  modified_base 8: mod_base = OTHER; note = 2'-O-methyl uridine
  modified_base 9: mod_base = OTHER; note = 2'-O-methyl guanosine
  modified_base 10: mod_base = OTHER; note = 2'-O-methyl uridine
  modified_base 11: mod_base = OTHER; note = 2'-O-methyl guanosine
  modified_base 12: mod_base = OTHER; note = 2'-fluoro guanosine
  modified_base 13: mod_base = OTHER; note = 2'-O-methyl cytidine
  modified_base 14: mod_base = OTHER; note = 2'-fluoro cytidine
  modified_base 15: mod_base = OTHER; note = 2'-O-methyl guanosine
  modified_base 16: mod_base = OTHER; note = 2'-fluoro uridine
  modified_base 17: mod_base = OTHER; note = 2'-O-methyl uridine
  modified_base 18: mod_base = OTHER; note = 2'-O-methyl uridine
  modified_base 19: mod_base = OTHER; note = 2'-O-methyl adenosine
  modified_base 20: mod_base = OTHER; note = 2'-O-methyl cytidine
  modified_base 21: mod_base = OTHER; note = 2'-fluoro guanosine
  modified_base 22: mod_base = OTHER; note = 2'-O-methyl uridine
  modified_base 23: mod_base = OTHER; note = 2'-O-methyl cytidine
  modified_base 24: mod_base = OTHER; note = 2'-O-methyl guanosine
  modified_base 25: mod_base = OTHER; note = 2'-O-methyl guanosine
  modified_base 28: mod_base = OTHER; note = 2'-O-methyl guanosine
  modified_base 29: mod_base = OTHER; note = 2'-O-methyl uridine
  modified_base 30: mod_base = OTHER; note = 2'-O-methyl adenosine
  modified_base 31: mod_base = OTHER; note = 2'-O-methyl guanosine
  modified_base 32: mod_base = OTHER; note = 2'-O-methyl cytidine
  modified_base 36: mod_base = OTHER; note = Deoxycytidine phosphorothioate
  modified_base 38: mod_base = OTHER; note = 2'-O-methyl uridine
  modified_base 39: mod_base = OTHER; note = 2'-O-methyl uridine
  modified_base 40: mod_base = OTHER; note = 2'-O-methyl cytidine
  modified_base 41: mod_base = OTHER; note = 2'-O-methyl uridine
  modified_base 42: mod_base = OTHER; note = 2'-O-methyl cytidine
  modified_base 43: mod_base = OTHER; note = 2'-O-methyl adenosine
  modified_base 44: mod_base = OTHER; note = 2'-O-methyl uridine
  modified_base 45: mod_base = OTHER; note = 2'-O-methyl uridine phosphorothioate
  modified_base 46: mod_base = OTHER; note = 2'-O-methyl uridine phosphorothioate
  modified_base 47: mod_base = OTHER; note = 2'-O-methyl cytidine phosphorothioate
  modified_base 48: mod_base = OTHER; note = 2'-O-methyl guanosine
  misc_feature 1..6: note = RNA
  misc_feature 7: note = DNA
  misc_feature 8..35: note = RNA
  misc_feature 36: note = DNA
  misc_feature 37..48: note = RNA

SEQ ID NO: 375 - DNA, 48 bp, synthetic construct; identical to SEQ ID NO: 317
  source 1..48: mol_type = other DNA
  modified_base 1: mod_base = OTHER; note = 2'-O-methyl cytidine phosphorothioate
  modified_base 2: mod_base = OTHER; note = 2'-O-methyl uridine phosphorothioate
  modified_base 3: mod_base = OTHER; note = 2'-O-methyl guanosine phosphorothioate
  modified_base 4: mod_base = OTHER; note = 2'-O-methyl adenosine
  modified_base 5: mod_base = OTHER; note = 2'-O-methyl adenosine
  modified_base 6: mod_base = OTHER; note = 2'-O-methyl cytidine
  modified_base 7: mod_base = OTHER; note = Deoxythymidine phosphorothioate
  modified_base 8: mod_base = OTHER; note = 2'-O-methyl uridine
  modified_base 9: mod_base = OTHER; note = 2'-O-methyl guanosine
  modified_base 10: mod_base = OTHER; note = 2'-O-methyl uridine
  modified_base 11: mod_base = OTHER; note = 2'-O-methyl guanosine
  modified_base 12: mod_base = OTHER; note = 2'-fluoro guanosine
  modified_base 13: mod_base = OTHER; note = 2'-O-methyl cytidine
  modified_base 14: mod_base = OTHER; note = 2'-fluoro cytidine
  modified_base 15: mod_base = OTHER; note = 2'-O-methyl guanosine
  modified_base 16: mod_base = OTHER; note = 2'-fluoro uridine
  modified_base 17: mod_base = OTHER; note = 2'-O-methyl uridine
  modified_base 18: mod_base = OTHER; note = 2'-O-methyl uridine
  modified_base 19: mod_base = OTHER; note = 2'-O-methyl adenosine
  modified_base 20: mod_base = OTHER; note = 2'-O-methyl cytidine
  modified_base 21: mod_base = OTHER; note = 2'-fluoro guanosine
  modified_base 22: mod_base = OTHER; note = 2'-O-methyl uridine
  modified_base 23: mod_base = OTHER; note = 2'-O-methyl cytidine
  modified_base 24: mod_base = OTHER; note = 2'-O-methyl guanosine
  modified_base 25: mod_base = OTHER; note = 2'-O-methyl guanosine
  modified_base 28: mod_base = OTHER; note = 2'-O-methyl guanosine
  modified_base 29: mod_base = OTHER; note = 2'-O-methyl uridine
  modified_base 30: mod_base = OTHER; note = 2'-O-methyl adenosine
  modified_base 31: mod_base = OTHER; note = 2'-O-methyl guanosine
  modified_base 32: mod_base = OTHER; note = 2'-O-methyl cytidine
  modified_base 35: mod_base = OTHER; note = Deoxycytidine phosphorothioate
  modified_base 38: mod_base = OTHER; note = 2'-O-methyl uridine
  modified_base 39: mod_base = OTHER; note = 2'-O-methyl uridine
  modified_base 40: mod_base = OTHER; note = 2'-O-methyl cytidine
  modified_base 41: mod_base = OTHER; note = 2'-O-methyl uridine
  modified_base 42: mod_base = OTHER; note = 2'-O-methyl cytidine
  modified_base 43: mod_base = OTHER; note = 2'-O-methyl adenosine
  modified_base 44: mod_base = OTHER; note = 2'-O-methyl uridine
  modified_base 45: mod_base = OTHER; note = 2'-O-methyl uridine phosphorothioate
  modified_base 46: mod_base = OTHER; note = 2'-O-methyl uridine phosphorothioate
  modified_base 47: mod_base = OTHER; note = 2'-O-methyl cytidine phosphorothioate
  modified_base 48: mod_base = OTHER; note = 2'-O-methyl guanosine
  misc_feature 1..6: note = RNA
  misc_feature 7: note = DNA
  misc_feature 8..34: note = RNA
  misc_feature 35: note = DNA
  misc_feature 36..48: note = RNA

SEQ ID NO: 376 - DNA, 48 bp, synthetic construct; identical to SEQ ID NO: 317
  source 1..48: mol_type = other DNA
  modified_base 1: mod_base = OTHER; note = 2'-O-methyl cytidine phosphorothioate
  modified_base 2: mod_base = OTHER; note = 2'-O-methyl uridine phosphorothioate
  modified_base 3: mod_base = OTHER; note = 2'-O-methyl guanosine phosphorothioate
  modified_base 4: mod_base = OTHER; note = 2'-O-methyl adenosine
  modified_base 5: mod_base = OTHER; note = 2'-O-methyl adenosine
  modified_base 6: mod_base = OTHER; note = 2'-O-methyl cytidine
  modified_base 7: mod_base = OTHER; note = Deoxythymidine phosphorothioate
  modified_base 8: mod_base = OTHER; note = 2'-O-methyl uridine
  modified_base 9: mod_base = OTHER; note = 2'-O-methyl guanosine
  modified_base 10: mod_base = OTHER; note = 2'-O-methyl uridine
  modified_base 11: mod_base = OTHER; note = 2'-O-methyl guanosine
  modified_base 12: mod_base = OTHER; note = 2'-fluoro guanosine
  modified_base 13: mod_base = OTHER; note = 2'-O-methyl cytidine
  modified_base 14: mod_base = OTHER; note = 2'-fluoro cytidine
  modified_base 15: mod_base = OTHER; note = 2'-O-methyl guanosine
  modified_base 16: mod_base = OTHER; note = 2'-fluoro uridine
  modified_base 17: mod_base = OTHER; note = 2'-O-methyl uridine
  modified_base 18: mod_base = OTHER; note = 2'-O-methyl uridine
  modified_base 19: mod_base = OTHER; note = 2'-O-methyl adenosine
  modified_base 20: mod_base = OTHER; note = 2'-O-methyl cytidine
  modified_base 21: mod_base = OTHER; note = 2'-fluoro guanosine
  modified_base 22: mod_base = OTHER; note = 2'-O-methyl uridine
  modified_base 23: mod_base = OTHER; note = 2'-O-methyl cytidine
  modified_base 24: mod_base = OTHER; note = 2'-O-methyl guanosine
  modified_base 25: mod_base = OTHER; note = 2'-O-methyl guanosine
  modified_base 28: mod_base = OTHER; note = 2'-O-methyl guanosine
  modified_base 29: mod_base = OTHER; note = 2'-O-methyl uridine
  modified_base 30: mod_base = OTHER; note = 2'-O-methyl adenosine
  modified_base 31: mod_base = OTHER; note = 2'-O-methyl guanosine
  modified_base 32: mod_base = OTHER; note = 2'-O-methyl cytidine
  modified_base 37: mod_base = OTHER; note = Deoxythymidine phosphorothioate
  modified_base 38: mod_base = OTHER; note = 2'-O-methyl uridine
  modified_base 39: mod_base = OTHER; note = 2'-O-methyl uridine
  modified_base 40: mod_base = OTHER; note = 2'-O-methyl cytidine
  modified_base 41: mod_base = OTHER; note = 2'-O-methyl uridine
  modified_base 42: mod_base = OTHER; note = 2'-O-methyl cytidine
  modified_base 43: mod_base = OTHER; note = 2'-O-methyl adenosine
  modified_base 44: mod_base = OTHER; note = 2'-O-methyl uridine
  modified_base 45: mod_base = OTHER; note = 2'-O-methyl uridine phosphorothioate
  modified_base 46: mod_base = OTHER; note = 2'-O-methyl uridine phosphorothioate
  modified_base 47: mod_base = OTHER; note = 2'-O-methyl cytidine phosphorothioate
  modified_base 48: mod_base = OTHER; note = 2'-O-methyl guanosine
  misc_feature 1..6: note = RNA
  misc_feature 7: note = DNA
  misc_feature 8..36: note = RNA
  misc_feature 37: note = DNA
  misc_feature 38..48: note = RNA

SEQ ID NO: 377 - DNA, 48 bp, synthetic construct; identical to SEQ ID NO: 317
  source 1..48: mol_type = other DNA
  modified_base 1: mod_base = OTHER; note = 2'-O-methyl cytidine phosphorothioate
  modified_base 2: mod_base = OTHER; note = 2'-O-methyl uridine phosphorothioate
  modified_base 3: mod_base = OTHER; note = 2'-O-methyl guanosine phosphorothioate
  modified_base 4: mod_base = OTHER; note = 2'-O-methyl adenosine
  modified_base 5: mod_base = OTHER; note = 2'-O-methyl adenosine
  modified_base 6: mod_base = OTHER; note = 2'-O-methyl cytidine
  modified_base 7: mod_base = OTHER; note = Deoxythymidine phosphorothioate
  modified_base 8: mod_base = OTHER; note = 2'-O-methyl uridine
  modified_base 9: mod_base = OTHER; note = 2'-O-methyl guanosine
  modified_base 10: mod_base = OTHER; note = 2'-O-methyl uridine
  modified_base 11: mod_base = OTHER; note = 2'-O-methyl guanosine
  modified_base 12: mod_base = OTHER; note = 2'-fluoro guanosine
  modified_base 13: mod_base = OTHER; note = 2'-O-methyl cytidine
  modified_base 14: mod_base = OTHER; note = 2'-fluoro cytidine
  modified_base 15: mod_base = OTHER; note = 2'-O-methyl guanosine
  modified_base 16: mod_base = OTHER; note = 2'-fluoro uridine
  modified_base 17: mod_base = OTHER; note = 2'-O-methyl uridine
  modified_base 18: mod_base = OTHER; note = 2'-O-methyl uridine
  modified_base 19: mod_base = OTHER; note = 2'-O-methyl adenosine
  modified_base 20: mod_base = OTHER; note = 2'-O-methyl cytidine
  modified_base 21: mod_base = OTHER; note = 2'-fluoro guanosine
  modified_base 22: mod_base = OTHER; note = 2'-O-methyl uridine
  modified_base 23: mod_base = OTHER; note = 2'-O-methyl cytidine
  modified_base 24: mod_base = OTHER; note = 2'-O-methyl guanosine
  modified_base 25: mod_base = OTHER; note = 2'-O-methyl guanosine
  modified_base 28: mod_base = OTHER; note = 2'-O-methyl guanosine
  modified_base 29: mod_base = OTHER; note = 2'-O-methyl uridine
  modified_base 30: mod_base = OTHER; note = 2'-O-methyl adenosine
  modified_base 31: mod_base = OTHER; note = 2'-O-methyl guanosine
  modified_base 32: mod_base = OTHER; note = 2'-O-methyl cytidine
  modified_base 35: mod_base = OTHER; note = 2'-O-methyl cytidine
  modified_base 38: mod_base = OTHER; note = 2'-O-methyl uridine
  modified_base 39: mod_base = OTHER; note = 2'-O-methyl uridine
  modified_base 40: mod_base = OTHER; note = 2'-O-methyl cytidine
  modified_base 41: mod_base = OTHER; note = 2'-O-methyl uridine
  modified_base 42: mod_base = OTHER; note = 2'-O-methyl cytidine
  modified_base 43: mod_base = OTHER; note = 2'-O-methyl adenosine
  modified_base 44: mod_base = OTHER; note = 2'-O-methyl uridine
  modified_base 45: mod_base = OTHER; note = 2'-O-methyl uridine phosphorothioate
  modified_base 46: mod_base = OTHER; note = 2'-O-methyl uridine phosphorothioate
  modified_base 47: mod_base = OTHER; note = 2'-O-methyl cytidine phosphorothioate
  modified_base 48: mod_base = OTHER; note = 2'-O-methyl guanosine
  misc_feature 1..6: note = RNA
  misc_feature 7: note = DNA
  misc_feature 8..48: note = RNA

SEQ ID NO: 378 - DNA, 48 bp, synthetic construct; identical to SEQ ID NO: 317
  source 1..48: mol_type = other DNA
  modified_base 1: mod_base = OTHER; note = 2'-O-methyl cytidine phosphorothioate
  modified_base 2: mod_base = OTHER; note = 2'-O-methyl uridine phosphorothioate
  modified_base 3: mod_base = OTHER; note = 2'-O-methyl guanosine phosphorothioate
  modified_base 4: mod_base = OTHER; note = 2'-O-methyl adenosine
  modified_base 5: mod_base = OTHER; note = 2'-O-methyl adenosine
  modified_base 6: mod_base = OTHER; note = 2'-O-methyl cytidine
  modified_base 7: mod_base = OTHER; note = Deoxythymidine phosphorothioate
  modified_base 8: mod_base = OTHER; note = 2'-O-methyl uridine
  modified_base 9: mod_base = OTHER; note = 2'-O-methyl guanosine
  modified_base 10: mod_base = OTHER; note = 2'-O-methyl uridine
  modified_base 11: mod_base = OTHER; note = 2'-O-methyl guanosine
  modified_base 12: mod_base = OTHER; note = 2'-fluoro guanosine
  modified_base 13: mod_base = OTHER; note = 2'-O-methyl cytidine
  modified_base 14: mod_base = OTHER; note = 2'-fluoro cytidine
  modified_base 15: mod_base = OTHER; note = 2'-O-methyl guanosine
  modified_base 16: mod_base = OTHER; note = 2'-fluoro uridine
  modified_base 17: mod_base = OTHER; note = 2'-O-methyl uridine
  modified_base 18: mod_base = OTHER; note = 2'-O-methyl uridine
  modified_base 19: mod_base = OTHER; note = 2'-O-methyl adenosine
  modified_base 20: mod_base = OTHER; note = 2'-O-methyl cytidine
  modified_base 21: mod_base = OTHER; note = 2'-fluoro guanosine
  modified_base 22: mod_base = OTHER; note = 2'-O-methyl uridine
  modified_base 23: mod_base = OTHER; note = 2'-O-methyl cytidine
  modified_base 24: mod_base = OTHER; note = 2'-O-methyl guanosine
  modified_base 25: mod_base = OTHER; note = 2'-O-methyl guanosine
  modified_base 28: mod_base = OTHER; note = 2'-O-methyl guanosine
  modified_base 29: mod_base = OTHER; note = 2'-O-methyl uridine
  modified_base 30: mod_base = OTHER; note = 2'-O-methyl adenosine
  modified_base 31: mod_base = OTHER; note = 2'-O-methyl guanosine
  modified_base 32: mod_base = OTHER; note = 2'-O-methyl cytidine
  modified_base 35: mod_base = OTHER; note = Deoxycytidine phosphorothioate
  modified_base 36: mod_base = OTHER; note = Deoxycytidine phosphorothioate
  modified_base 38: mod_base = OTHER; note = 2'-O-methyl uridine
  modified_base 39: mod_base = OTHER; note = 2'-O-methyl uridine
  modified_base 40: mod_base = OTHER; note = 2'-O-methyl cytidine
  modified_base 41: mod_base = OTHER; note = 2'-O-methyl uridine
  modified_base 42: mod_base = OTHER; note = 2'-O-methyl cytidine
  modified_base 43: mod_base = OTHER; note = 2'-O-methyl adenosine
  modified_base 44: mod_base = OTHER; note = 2'-O-methyl uridine
  modified_base 45: mod_base = OTHER; note = 2'-O-methyl uridine phosphorothioate
  modified_base 46: mod_base = OTHER; note = 2'-O-methyl uridine phosphorothioate
  modified_base 47: mod_base = OTHER; note = 2'-O-methyl cytidine phosphorothioate
  modified_base 48: mod_base = OTHER; note = 2'-O-methyl guanosine
  misc_feature 1..6: note = RNA
  misc_feature 7: note = DNA
  misc_feature 8..34: note = RNA
  misc_feature 35..36: note = DNA
  misc_feature 37..48: note = RNA

SEQ ID NO: 379 - DNA, 48 bp, synthetic construct; identical to SEQ ID NO: 317
  source 1..48: mol_type = other DNA
  modified_base 1: mod_base = OTHER; note = 2'-O-methyl cytidine phosphorothioate
  modified_base 2: mod_base = OTHER; note = 2'-O-methyl uridine phosphorothioate
  modified_base 3: mod_base = OTHER; note = 2'-O-methyl guanosine phosphorothioate
  modified_base 4: mod_base = OTHER; note = 2'-O-methyl adenosine
  modified_base 5: mod_base = OTHER; note = 2'-O-methyl adenosine
  modified_base 6: mod_base = OTHER; note = 2'-O-methyl cytidine
  modified_base 7: mod_base = OTHER; note = Deoxythymidine phosphorothioate
  modified_base 8: mod_base = OTHER; note = 2'-O-methyl uridine
  modified_base 9: mod_base = OTHER; note = 2'-O-methyl guanosine
  modified_base 10: mod_base = OTHER; note = 2'-O-methyl uridine
  modified_base 11: mod_base = OTHER; note = 2'-O-methyl guanosine
  modified_base 12: mod_base = OTHER; note = 2'-fluoro guanosine
  modified_base 13: mod_base = OTHER; note = 2'-O-methyl cytidine
  modified_base 14: mod_base = OTHER; note = 2'-fluoro cytidine
  modified_base 15: mod_base = OTHER; note = 2'-O-methyl guanosine
  modified_base 16: mod_base = OTHER; note = 2'-fluoro uridine
  modified_base 17: mod_base = OTHER; note = 2'-O-methyl uridine
  modified_base 18: mod_base = OTHER; note = 2'-O-methyl uridine
  modified_base 19: mod_base = OTHER; note = 2'-O-methyl adenosine
  modified_base 20: mod_base = OTHER; note = 2'-O-methyl cytidine
  modified_base 21: mod_base = OTHER; note = 2'-fluoro guanosine
  modified_base 22: mod_base = OTHER; note = 2'-O-methyl uridine
  modified_base 23: mod_base = OTHER; note = 2'-O-methyl cytidine
  modified_base 24: mod_base = OTHER; note = 2'-O-methyl guanosine
  modified_base 25: mod_base = OTHER; note = 2'-O-methyl guanosine
  modified_base 28: mod_base = OTHER; note = 2'-O-methyl guanosine
  modified_base 29: mod_base = OTHER; note = 2'-O-methyl uridine
  modified_base 30: mod_base = OTHER; note = 2'-O-methyl adenosine
  modified_base 31: mod_base = OTHER; note = 2'-O-methyl guanosine
  modified_base 32: mod_base = OTHER; note = 2'-O-methyl cytidine
  modified_base 35: mod_base = OTHER; note = Deoxycytidine phosphorothioate
  modified_base 37: mod_base = OTHER; note = Deoxythymidine phosphorothioate
  modified_base 38: mod_base = OTHER; note = 2'-O-methyl uridine
  modified_base 39: mod_base = OTHER; note = 2'-O-methyl uridine
  modified_base 40: mod_base = OTHER; note = 2'-O-methyl cytidine
  modified_base 41: mod_base = OTHER; note = 2'-O-methyl uridine
  modified_base 42: mod_base = OTHER; note = 2'-O-methyl cytidine
  modified_base 43: mod_base = OTHER; note = 2'-O-methyl adenosine
  modified_base 44: mod_base = OTHER; note = 2'-O-methyl uridine
  modified_base 45: mod_base = OTHER; note = 2'-O-methyl uridine phosphorothioate
  modified_base 46: mod_base = OTHER; note = 2'-O-methyl uridine phosphorothioate
  modified_base 47: mod_base = OTHER; note = 2'-O-methyl cytidine phosphorothioate
  modified_base 48: mod_base = OTHER; note = 2'-O-methyl guanosine
  misc_feature 1..6: note = RNA
  misc_feature 7: note = DNA
  misc_feature 8..34: note = RNA
  misc_feature 35: note = DNA
  misc_feature 36: note = RNA
  misc_feature 37: note = DNA
  misc_feature 38..48: note = RNA

SEQ ID NO: 380 - DNA, 48 bp, synthetic construct; identical to SEQ ID NO: 317
  source 1..48: mol_type = other DNA
  modified_base 1: mod_base = OTHER; note = 2'-O-methyl cytidine phosphorothioate
  modified_base 2: mod_base = OTHER; note = 2'-O-methyl uridine phosphorothioate
  modified_base 3: mod_base = OTHER; note = 2'-O-methyl guanosine phosphorothioate
  modified_base 4: mod_base = OTHER; note = 2'-O-methyl adenosine
  modified_base 5: mod_base = OTHER; note = 2'-O-methyl adenosine
  modified_base 6: mod_base = OTHER; note = 2'-O-methyl cytidine
  modified_base 7: mod_base = OTHER; note = Deoxythymidine phosphorothioate
  modified_base 8: mod_base = OTHER; note = 2'-O-methyl uridine
  modified_base 9: mod_base = OTHER; note = 2'-O-methyl guanosine
  modified_base 10: mod_base = OTHER; note = 2'-O-methyl uridine
  modified_base 11: mod_base = OTHER; note = 2'-O-methyl guanosine
  modified_base 12: mod_base = OTHER; note = 2'-fluoro guanosine
  modified_base 13: mod_base = OTHER; note = 2'-O-methyl cytidine
  modified_base 14: mod_base = OTHER; note = 2'-fluoro cytidine
  modified_base 15: mod_base = OTHER; note = 2'-O-methyl guanosine
  modified_base 16: mod_base = OTHER; note = 2'-fluoro uridine
  modified_base 17: mod_base = OTHER; note = 2'-O-methyl uridine
  modified_base 18: mod_base = OTHER; note = 2'-O-methyl uridine
  modified_base 19: mod_base = OTHER; note = 2'-O-methyl adenosine
  modified_base 20: mod_base = OTHER; note = 2'-O-methyl cytidine
  modified_base 21: mod_base = OTHER; note = 2'-fluoro guanosine
  modified_base 22: mod_base = OTHER; note = 2'-O-methyl uridine
  modified_base 23: mod_base = OTHER; note = 2'-O-methyl cytidine
  modified_base 24: mod_base = OTHER; note = 2'-O-methyl guanosine
  modified_base 25: mod_base = OTHER; note = 2'-O-methyl guanosine
  modified_base 28: mod_base = OTHER; note = 2'-O-methyl guanosine
  modified_base 29: mod_base = OTHER; note = 2'-O-methyl uridine
  modified_base 30: mod_base = OTHER; note = 2'-O-methyl adenosine
  modified_base 31: mod_base = OTHER; note = 2'-O-methyl guanosine
  modified_base 32: mod_base = OTHER; note = 2'-O-methyl cytidine
  modified_base 35: mod_base = OTHER; note = Deoxycytidine phosphorothioate
  modified_base 36: mod_base = OTHER; note = Deoxycytidine phosphorothioate
  modified_base 37: mod_base = OTHER; note = Deoxythymidine phosphorothioate
  modified_base 38: mod_base = OTHER; note = 2'-O-methyl uridine
  modified_base 39: mod_base = OTHER; note = 2'-O-methyl uridine
  modified_base 40: mod_base = OTHER; note = 2'-O-methyl cytidine
  modified_base 41: mod_base = OTHER; note = 2'-O-methyl uridine
  modified_base 42: mod_base = OTHER; note = 2'-O-methyl cytidine
  modified_base 43: mod_base = OTHER; note = 2'-O-methyl adenosine
  modified_base 44: mod_base = OTHER; note = 2'-O-methyl uridine
  modified_base 45: mod_base = OTHER; note = 2'-O-methyl uridine phosphorothioate
  modified_base 46: mod_base = OTHER; note = 2'-O-methyl uridine phosphorothioate
  modified_base 47: mod_base = OTHER; note = 2'-O-methyl cytidine phosphorothioate
  modified_base 48: mod_base = OTHER; note = 2'-O-methyl guanosine
  misc_feature 1..6: note = RNA
  misc_feature 7: note = DNA
  misc_feature 8..34: note = RNA
  misc_feature 35..37: note = DNA
  misc_feature 38..48: note = RNA

SEQ ID NO: 381 - DNA, 48 bp, synthetic construct; identical to SEQ ID NO: 317
  source 1..48: mol_type = other DNA
  modified_base 1: mod_base = OTHER; note = 2'-O-methyl cytidine phosphorothioate
  modified_base 2: mod_base = OTHER; note = 2'-O-methyl uridine phosphorothioate
  modified_base 3: mod_base = OTHER; note = 2'-O-methyl guanosine phosphorothioate
  modified_base 4: mod_base = OTHER; note = 2'-O-methyl adenosine
  modified_base 5: mod_base = OTHER; note = 2'-O-methyl adenosine
  modified_base 6: mod_base = OTHER; note = 2'-O-methyl cytidine
  modified_base 7: mod_base = OTHER; note = Deoxythymidine phosphorothioate
  modified_base 8: mod_base = OTHER; note = 2'-O-methyl uridine
  modified_base 9: mod_base = OTHER; note = 2'-O-methyl guanosine
  modified_base 10: mod_base = OTHER; note = 2'-O-methyl uridine
  modified_base 11: mod_base = OTHER; note = 2'-O-methyl guanosine
  modified_base 12: mod_base = OTHER; note = 2'-fluoro guanosine
  modified_base 13: mod_base = OTHER; note = 2'-O-methyl cytidine
  modified_base 14: mod_base = OTHER; note = 2'-fluoro cytidine
  modified_base 15: mod_base = OTHER; note = 2'-O-methyl guanosine
  modified_base 16: mod_base = OTHER; note = 2'-fluoro uridine
  modified_base 17: mod_base = OTHER; note = 2'-O-methyl uridine
  modified_base 18: mod_base = OTHER; note = 2'-O-methyl uridine
  modified_base 19: mod_base = OTHER; note = 2'-O-methyl adenosine
  modified_base 20: mod_base = OTHER; note = 2'-O-methyl cytidine
  modified_base 21: mod_base = OTHER; note = 2'-fluoro guanosine
  modified_base 22: mod_base = OTHER; note = 2'-O-methyl uridine
  modified_base 23: mod_base = OTHER; note = 2'-O-methyl cytidine
  modified_base 24: mod_base = OTHER; note = 2'-O-methyl guanosine
  modified_base 25: mod_base = OTHER; note = 2'-O-methyl guanosine
  modified_base 28: mod_base = OTHER; note = 2'-O-methyl guanosine
  modified_base 29: mod_base = OTHER; note = 2'-O-methyl uridine
  modified_base 30: mod_base = OTHER; note = 2'-O-methyl adenosine
  modified_base 31: mod_base = OTHER; note = 2'-O-methyl guanosine
  modified_base 32: mod_base = OTHER; note = 2'-O-methyl cytidine
  modified_base 35: mod_base = OTHER; note = 2'-O-methyl cytidine
  modified_base 36: mod_base = OTHER; note = Deoxycytidine phosphorothioate
  modified_base 38: mod_base = OTHER; note = 2'-O-methyl uridine
  modified_base 39: mod_base = OTHER; note = 2'-O-methyl uridine
  modified_base 40: mod_base = OTHER; note = 2'-O-methyl cytidine
  modified_base 41: mod_base = OTHER; note = 2'-O-methyl uridine
  modified_base 42: mod_base = OTHER; note = 2'-O-methyl cytidine
  modified_base 43: mod_base = OTHER; note = 2'-O-methyl adenosine
  modified_base 44: mod_base = OTHER; note = 2'-O-methyl uridine
  modified_base 45: mod_base = OTHER; note = 2'-O-methyl uridine phosphorothioate
  modified_base 46: mod_base = OTHER; note = 2'-O-methyl uridine phosphorothioate
  modified_base 47: mod_base = OTHER; note = 2'-O-methyl cytidine phosphorothioate
  modified_base 48: mod_base = OTHER; note = 2'-O-methyl guanosine
  misc_feature 1..6: note = RNA
  misc_feature 7: note = DNA
  misc_feature 8..35: note = RNA
  misc_feature 36: note = DNA
  misc_feature 37..48: note = RNA

SEQ ID NO: 382 - DNA, 48 bp, synthetic construct; identical to SEQ ID NO: 317
  source 1..48: mol_type = other DNA
  modified_base 1: mod_base = OTHER; note = 2'-O-methyl cytidine phosphorothioate
  modified_base 2: mod_base = OTHER; note = 2'-O-methyl uridine phosphorothioate
  modified_base 3: mod_base = OTHER; note = 2'-O-methyl guanosine phosphorothioate
  modified_base 4: mod_base = OTHER; note = 2'-O-methyl adenosine
  modified_base 5: mod_base = OTHER; note = 2'-O-methyl adenosine
  modified_base 6: mod_base = OTHER; note = 2'-O-methyl cytidine
  modified_base 7: mod_base = OTHER; note = Deoxythymidine phosphorothioate
  modified_base 8: mod_base = OTHER; note = 2'-O-methyl uridine
  modified_base 9: mod_base = OTHER; note = 2'-O-methyl guanosine
  modified_base 10: mod_base = OTHER; note = 2'-O-methyl uridine
  modified_base 11: mod_base = OTHER; note = 2'-O-methyl guanosine
  modified_base 12: mod_base = OTHER; note = 2'-fluoro guanosine
  modified_base 13: mod_base = OTHER; note = 2'-O-methyl cytidine
  modified_base 14: mod_base = OTHER; note = 2'-fluoro cytidine
  modified_base 15: mod_base = OTHER; note = 2'-O-methyl guanosine
  modified_base 16: mod_base = OTHER; note = 2'-fluoro uridine
  modified_base 17: mod_base = OTHER; note = 2'-O-methyl uridine
  modified_base 18: mod_base = OTHER; note = 2'-O-methyl uridine
  modified_base 19: mod_base = OTHER; note = 2'-O-methyl adenosine
  modified_base 20: mod_base = OTHER; note = 2'-O-methyl cytidine
  modified_base 21: mod_base = OTHER; note = 2'-fluoro guanosine
  modified_base 22: mod_base = OTHER; note = 2'-O-methyl uridine
  modified_base 23: mod_base = OTHER; note = 2'-O-methyl cytidine
  modified_base 24: mod_base = OTHER; note = 2'-O-methyl guanosine
  modified_base 25: mod_base = OTHER; note = 2'-O-methyl guanosine
  modified_base 28: mod_base = OTHER; note = 2'-O-methyl guanosine
  modified_base 29: mod_base = OTHER; note = 2'-O-methyl uridine
  modified_base 30: mod_base = OTHER; note = 2'-O-methyl adenosine
  modified_base 31: mod_base = OTHER; note = 2'-O-methyl guanosine
  modified_base 32: mod_base = OTHER; note = 2'-O-methyl cytidine
  modified_base 35: mod_base = OTHER; note = 2'-O-methyl cytidine
  modified_base 37: mod_base = OTHER; note = Deoxythymidine phosphorothioate
  modified_base 38: mod_base = OTHER; note = 2'-O-methyl uridine
  modified_base 39: mod_base = OTHER; note = 2'-O-methyl uridine
  modified_base 40: mod_base = OTHER; note = 2'-O-methyl cytidine
  modified_base 41: mod_base = OTHER; note = 2'-O-methyl uridine
  modified_base 42: mod_base = OTHER; note = 2'-O-methyl cytidine
  modified_base 43: mod_base = OTHER; note = 2'-O-methyl adenosine
  modified_base 44: mod_base = OTHER; note = 2'-O-methyl uridine
  modified_base 45: mod_base = OTHER; note = 2'-O-methyl uridine phosphorothioate
  modified_base 46: mod_base = OTHER; note = 2'-O-methyl uridine phosphorothioate
  modified_base 47: mod_base = OTHER; note = 2'-O-methyl cytidine phosphorothioate
  modified_base 48: mod_base = OTHER; note = 2'-O-methyl guanosine
  misc_feature 1..6: note = RNA
  misc_feature 7: note = DNA
  misc_feature 8..36: note = RNA
  misc_feature 37: note = DNA
  misc_feature 38..48: note = RNA

SEQ ID NO: 383 - DNA, 48 bp, synthetic construct; identical to SEQ ID NO: 317
  source 1..48: mol_type = other DNA
  modified_base 1: mod_base = OTHER; note = 2'-O-methyl cytidine phosphorothioate
  modified_base 2: mod_base = OTHER; note = 2'-O-methyl uridine phosphorothioate
  modified_base 3: mod_base = OTHER; note = 2'-O-methyl guanosine phosphorothioate
  modified_base 4: mod_base = OTHER; note = 2'-O-methyl adenosine
  modified_base 5: mod_base = OTHER; note = 2'-O-methyl adenosine
  modified_base 6: mod_base = OTHER; note = 2'-O-methyl cytidine
  modified_base 7: mod_base = OTHER; note = Deoxythymidine phosphorothioate
  modified_base 8: mod_base = OTHER; note = 2'-O-methyl uridine
  modified_base 9: mod_base = OTHER; note = 2'-O-methyl guanosine
  modified_base 10: mod_base = OTHER; note = 2'-O-methyl uridine
  modified_base 11: mod_base = OTHER; note = 2'-O-methyl guanosine
  modified_base 12: mod_base = OTHER; note = 2'-fluoro guanosine
  modified_base 13: mod_base = OTHER; note = 2'-O-methyl cytidine
  modified_base 14: mod_base = OTHER; note = 2'-fluoro cytidine
  modified_base 15: mod_base = OTHER; note = 2'-O-methyl guanosine
  modified_base 16: mod_base = OTHER; note = 2'-fluoro uridine
  modified_base 17: mod_base = OTHER; note = 2'-O-methyl uridine
  modified_base 18: mod_base = OTHER; note = 2'-O-methyl uridine
  modified_base 19: mod_base = OTHER; note = 2'-O-methyl adenosine
  modified_base 20: mod_base = OTHER; note = 2'-O-methyl cytidine
  modified_base 21: mod_base = OTHER; note = 2'-fluoro guanosine
  modified_base 22: mod_base = OTHER; note = 2'-O-methyl uridine
  modified_base 23: mod_base = OTHER; note = 2'-O-methyl cytidine
  modified_base 24: mod_base = OTHER; note = 2'-O-methyl guanosine
  modified_base 25: mod_base = OTHER; note = 2'-O-methyl guanosine
  modified_base 28: mod_base = OTHER; note = 2'-O-methyl guanosine
  modified_base 29: mod_base = OTHER; note = 2'-O-methyl uridine
  modified_base 30: mod_base = OTHER; note = 2'-O-methyl adenosine
  modified_base 31: mod_base = OTHER; note = 2'-O-methyl guanosine
  modified_base 32: mod_base = OTHER; note = 2'-O-methyl cytidine
  modified_base 35: mod_base = OTHER; note = 2'-O-methyl cytidine
  modified_base 36: mod_base = OTHER; note = Deoxycytidine phosphorothioate
  modified_base 37: mod_base = OTHER; note = Deoxythymidine phosphorothioate
  modified_base 38: mod_base = OTHER; note = 2'-O-methyl uridine
  modified_base 39: mod_base = OTHER; note = 2'-O-methyl uridine
  modified_base 40: mod_base = OTHER; note = 2'-O-methyl cytidine
  modified_base 41: mod_base = OTHER; note = 2'-O-methyl uridine
  modified_base 42: mod_base = OTHER; note = 2'-O-methyl cytidine
  modified_base 43: mod_base = OTHER; note = 2'-O-methyl adenosine
  modified_base 44: mod_base = OTHER; note = 2'-O-methyl uridine
  modified_base 45: mod_base = OTHER; note = 2'-O-methyl uridine phosphorothioate
  modified_base 46: mod_base = OTHER; note = 2'-O-methyl uridine phosphorothioate
  modified_base 47: mod_base = OTHER; note = 2'-O-methyl cytidine phosphorothioate
  modified_base 48: mod_base = OTHER; note = 2'-O-methyl guanosine
  misc_feature 1..6: note = RNA
  misc_feature 7: note = DNA
  misc_feature 8..35: note = RNA
  misc_feature 36..37: note = DNA
  misc_feature 38..48: note = RNA

SEQ ID NO: 384 - DNA, 48 bp, synthetic construct; identical to SEQ ID NO: 317
  source 1..48: mol_type = other DNA
  modified_base 1: mod_base = OTHER; note = 2'-O-methyl cytidine phosphorothioate
  modified_base 2: mod_base = OTHER; note = 2'-O-methyl uridine phosphorothioate
  modified_base 3: mod_base = OTHER; note = 2'-O-methyl guanosine phosphorothioate
  modified_base 4: mod_base = OTHER; note = 2'-O-methyl adenosine
  modified_base 5: mod_base = OTHER; note = 2'-O-methyl adenosine
  modified_base 6: mod_base = OTHER; note = 2'-O-methyl cytidine
  modified_base 7: mod_base = OTHER; note = Deoxythymidine phosphorothioate
  modified_base 8: mod_base = OTHER; note = 2'-O-methyl uridine
  modified_base 9: mod_base = OTHER; note = 2'-O-methyl guanosine
  modified_base 10: mod_base = OTHER; note = 2'-O-methyl uridine
  modified_base 11: mod_base = OTHER; note = 2'-O-methyl guanosine
  modified_base 12: mod_base = OTHER; note = 2'-fluoro guanosine
  modified_base 13: mod_base = OTHER; note = 2'-O-methyl cytidine
  modified_base 14: mod_base = OTHER; note = 2'-fluoro cytidine
  modified_base 15: mod_base = OTHER; note = 2'-O-methyl guanosine
  modified_base 16: mod_base = OTHER; note = 2'-fluoro uridine
  modified_base 17: mod_base = OTHER; note = 2'-O-methyl uridine
  modified_base 18: mod_base = OTHER; note = 2'-O-methyl uridine
  modified_base 19: mod_base = OTHER; note = 2'-O-methyl adenosine
  modified_base 20: mod_base = OTHER; note = 2'-O-methyl cytidine
  modified_base 21: mod_base = OTHER; note = 2'-fluoro guanosine
  modified_base 22: mod_base = OTHER; note = 2'-O-methyl uridine
  modified_base 23: mod_base = OTHER; note = 2'-O-methyl cytidine
  modified_base 24: mod_base = OTHER; note = 2'-O-methyl guanosine
  modified_base 25: mod_base = OTHER; note = 2'-O-methyl guanosine
  modified_base 28: mod_base = OTHER; note = 2'-O-methyl guanosine
  modified_base 29: mod_base = OTHER; note = 2'-O-methyl uridine
  modified_base 30: mod_base = OTHER; note = 2'-O-methyl adenosine
  modified_base 31: mod_base = OTHER; note = 2'-O-methyl guanosine
  modified_base 32: mod_base = OTHER; note = 2'-O-methyl cytidine
  modified_base 35: mod_base = OTHER; note = 2'-O-methyl cytidine
  modified_base 36: mod_base = OTHER; note = 2'-O-methyl cytidine
  modified_base 38: mod_base = OTHER; note = 2'-O-methyl uridine
  modified_base 39: mod_base = OTHER; note = 2'-O-methyl uridine
  modified_base 40: mod_base = OTHER; note = 2'-O-methyl cytidine
  modified_base 41: mod_base = OTHER; note = 2'-O-methyl uridine
  modified_base 42: mod_base = OTHER; note = 2'-O-methyl cytidine
  modified_base 43: mod_base = OTHER; note = 2'-O-methyl adenosine
  modified_base 44: mod_base = OTHER; note = 2'-O-methyl uridine
  modified_base 45: mod_base = OTHER; note = 2'-O-methyl uridine phosphorothioate
  modified_base 46: mod_base = OTHER; note = 2'-O-methyl uridine phosphorothioate
  modified_base 47: mod_base = OTHER; note = 2'-O-methyl cytidine phosphorothioate
  modified_base 48: mod_base = OTHER; note = 2'-O-methyl guanosine
  misc_feature 1..6: note = RNA
  misc_feature 7: note = DNA
  misc_feature 8..48: note = RNA

SEQ ID NO: 385 - DNA, 48 bp, synthetic construct; identical to SEQ ID NO: 317
  source 1..48: mol_type = other DNA
  modified_base 1: mod_base = OTHER; note = 2'-O-methyl cytidine phosphorothioate
  modified_base 2: mod_base = OTHER; note = 2'-O-methyl uridine phosphorothioate
  modified_base 3: mod_base = OTHER; note = 2'-O-methyl guanosine phosphorothioate
  modified_base 4: mod_base = OTHER; note = 2'-O-methyl adenosine
  modified_base 5: mod_base = OTHER; note = 2'-O-methyl adenosine
  modified_base 6: mod_base = OTHER; note = 2'-O-methyl cytidine
  modified_base 7: mod_base = OTHER; note = Deoxythymidine phosphorothioate
  modified_base 8: mod_base = OTHER; note = 2'-O-methyl uridine
  modified_base 9: mod_base = OTHER; note = 2'-O-methyl guanosine
  modified_base 10: mod_base = OTHER; note = 2'-O-methyl uridine
  modified_base 11: mod_base = OTHER; note = 2'-O-methyl guanosine
  modified_base 12: mod_base = OTHER; note = 2'-fluoro guanosine
  modified_base 13: mod_base = OTHER; note = 2'-O-methyl cytidine
  modified_base 14: mod_base = OTHER; note = 2'-fluoro cytidine
  modified_base 15: mod_base = OTHER; note = 2'-O-methyl guanosine
  modified_base 16: mod_base = OTHER; note = 2'-fluoro uridine
  modified_base 17: mod_base = OTHER; note = 2'-O-methyl uridine
  modified_base 18: mod_base = OTHER; note = 2'-O-methyl uridine
  modified_base 19: mod_base = OTHER; note = 2'-O-methyl adenosine
  modified_base 20: mod_base = OTHER; note = 2'-O-methyl cytidine
  modified_base 21: mod_base = OTHER; note = 2'-fluoro guanosine
  modified_base 22: mod_base = OTHER; note = 2'-O-methyl uridine
  modified_base 23: mod_base = OTHER; note = 2'-O-methyl cytidine
  modified_base 24: mod_base = OTHER; note = 2'-O-methyl guanosine
  modified_base 25: mod_base = OTHER; note = 2'-O-methyl guanosine
  modified_base 28: mod_base = OTHER; note = 2'-O-methyl guanosine
  modified_base 29: mod_base = OTHER; note = 2'-O-methyl uridine
  modified_base 30: mod_base = OTHER; note = 2'-O-methyl adenosine
  modified_base 31: mod_base = OTHER; note = 2'-O-methyl guanosine
  modified_base 32: mod_base = OTHER; note = 2'-O-methyl cytidine
  modified_base 35: mod_base = OTHER; note = 2'-O-methyl cytidine
  modified_base 36: mod_base = OTHER; note = 2'-O-methyl cytidine
  modified_base 37: mod_base = OTHER; note = Deoxythymidine phosphorothioate
  modified_base 38: mod_base = OTHER; note = 2'-O-methyl uridine
  modified_base 39: mod_base = OTHER; note = 2'-O-methyl uridine
  modified_base 40: mod_base = OTHER; note = 2'-O-methyl cytidine
  modified_base 41: mod_base = OTHER; note = 2'-O-methyl uridine
  modified_base 42: mod_base = OTHER; note = 2'-O-methyl cytidine
  modified_base 43: mod_base = OTHER; note = 2'-O-methyl adenosine
  modified_base 44: mod_base = OTHER; note = 2'-O-methyl uridine
  modified_base 45: mod_base = OTHER; note = 2'-O-methyl uridine phosphorothioate
  modified_base 46: mod_base = OTHER; note = 2'-O-methyl uridine phosphorothioate
  modified_base 47: mod_base = OTHER; note = 2'-O-methyl cytidine phosphorothioate
  modified_base 48: mod_base = OTHER; note = 2'-O-methyl guanosine
  misc_feature 1..6: note = RNA
  misc_feature 7: note = DNA
  misc_feature 8..36: note = RNA
  misc_feature 37: note = DNA
  misc_feature 38..48: note = RNA

SEQ ID NO: 386 - DNA, 48 bp, synthetic construct; identical to SEQ ID NO: 317
  source 1..48: mol_type = other DNA
  modified_base 1: mod_base = OTHER; note = 2'-O-methyl cytidine phosphorothioate
  modified_base 2: mod_base = OTHER; note = 2'-O-methyl uridine phosphorothioate
  modified_base 3: mod_base = OTHER; note = 2'-O-methyl guanosine phosphorothioate
  modified_base 4: mod_base = OTHER; note = 2'-O-methyl adenosine
  modified_base 5: mod_base = OTHER; note = 2'-O-methyl adenosine
  modified_base 6: mod_base = OTHER; note = 2'-O-methyl cytidine
  modified_base 7: mod_base = OTHER; note = Deoxythymidine phosphorothioate
  modified_base 8: mod_base = OTHER; note = 2'-O-methyl uridine
  modified_base 9: mod_base = OTHER; note = 2'-O-methyl guanosine
  modified_base 10: mod_base = OTHER; note = 2'-O-methyl uridine
  modified_base 11: mod_base = OTHER; note = 2'-O-methyl guanosine
  modified_base 12: mod_base = OTHER; note = 2'-fluoro guanosine
  modified_base 13: mod_base = OTHER; note = 2'-O-methyl cytidine
  modified_base 14: mod_base = OTHER; note = 2'-fluoro cytidine
  modified_base 15: mod_base = OTHER; note = 2'-O-methyl guanosine
  modified_base 16: mod_base = OTHER; note = 2'-fluoro uridine
  modified_base 17: mod_base = OTHER; note = 2'-O-methyl uridine
  modified_base 18: mod_base = OTHER; note = 2'-O-methyl uridine
  modified_base 19: mod_base = OTHER; note = 2'-O-methyl adenosine
  modified_base 20: mod_base = OTHER; note = 2'-O-methyl cytidine
  modified_base 21: mod_base = OTHER; note = 2'-fluoro guanosine
  modified_base 22: mod_base = OTHER; note = 2'-O-methyl uridine
  modified_base 23: mod_base = OTHER; note = 2'-O-methyl cytidine
  modified_base 24: mod_base = OTHER; note = 2'-O-methyl guanosine
  modified_base 25: mod_base = OTHER; note = 2'-O-methyl guanosine
  modified_base 28: mod_base = OTHER; note = 2'-O-methyl guanosine
  modified_base 29: mod_base = OTHER; note = 2'-O-methyl uridine
  modified_base 30: mod_base = OTHER; note = 2'-O-methyl adenosine
  modified_base 31: mod_base = OTHER; note = 2'-O-methyl guanosine
  modified_base 32: mod_base = OTHER; note = 2'-O-methyl cytidine
  modified_base 33: mod_base = OTHER; note = Deoxythymidine phosphorothioate
  modified_base 36: mod_base = OTHER; note = Deoxycytidine phosphorothioate
  modified_base 38: mod_base = OTHER; note = 2'-O-methyl uridine
  modified_base 39: mod_base = OTHER; note = 2'-O-methyl uridine
  modified_base 40: mod_base = OTHER; note = 2'-O-methyl cytidine
  modified_base 41: mod_base = OTHER; note = 2'-O-methyl uridine
  modified_base 42: mod_base = OTHER; note = 2'-O-methyl cytidine
  modified_base 43: mod_base = OTHER; note = 2'-O-methyl adenosine
  modified_base 44: mod_base = OTHER; note = 2'-O-methyl uridine
  modified_base 45: mod_base = OTHER; note = 2'-O-methyl uridine phosphorothioate
  modified_base 46: mod_base = OTHER; note = 2'-O-methyl uridine phosphorothioate
  modified_base 47: mod_base = OTHER; note = 2'-O-methyl cytidine phosphorothioate
  modified_base 48: mod_base = OTHER; note = 2'-O-methyl guanosine
  misc_feature 1..6: note = RNA
  misc_feature 7: note = DNA
  misc_feature 8..32: note = RNA
  misc_feature 33: note = DNA
  misc_feature 34..35: note = RNA
  misc_feature 36: note = DNA
  misc_feature 37..48: note = RNA

SEQ ID NO: 387 - DNA, 48 bp, synthetic construct; identical to SEQ ID NO: 317
  source 1..48: mol_type = other DNA
  modified_base 1: mod_base = OTHER; note = 2'-O-methyl cytidine phosphorothioate
  modified_base 2: mod_base = OTHER; note = 2'-O-methyl uridine phosphorothioate
  modified_base 3: mod_base = OTHER; note = 2'-O-methyl guanosine phosphorothioate
  modified_base 4: mod_base = OTHER; note = 2'-O-methyl adenosine
  modified_base 5: mod_base = OTHER; note = 2'-O-methyl adenosine
  modified_base 6: mod_base = OTHER; note = 2'-O-methyl cytidine
  modified_base 7: mod_base = OTHER; note = Deoxythymidine phosphorothioate
  modified_base 8: mod_base = OTHER; note = 2'-O-methyl uridine
  modified_base 9: mod_base = OTHER; note = 2'-O-methyl guanosine
  modified_base 10: mod_base = OTHER; note = 2'-O-methyl uridine
  modified_base 11: mod_base = OTHER; note = 2'-O-methyl guanosine
  modified_base 12: mod_base = OTHER; note = 2'-fluoro guanosine
  modified_base 13: mod_base = OTHER; note = 2'-O-methyl cytidine
  modified_base 14: mod_base = OTHER; note = 2'-fluoro cytidine
  modified_base 15: mod_base = OTHER; note = 2'-O-methyl guanosine
  modified_base 16: mod_base = OTHER; note = 2'-fluoro uridine
  modified_base 17: mod_base = OTHER; note = 2'-O-methyl uridine
  modified_base 18: mod_base = OTHER; note = 2'-O-methyl uridine
  modified_base 19: mod_base = OTHER; note = 2'-O-methyl adenosine
  modified_base 20: mod_base = OTHER; note = 2'-O-methyl cytidine
  modified_base 21: mod_base = OTHER; note = 2'-fluoro guanosine
  modified_base 22: mod_base = OTHER; note = 2'-O-methyl uridine
  modified_base 23: mod_base = OTHER; note = 2'-O-methyl cytidine
  modified_base 24: mod_base = OTHER; note = 2'-O-methyl guanosine
  modified_base 25: mod_base = OTHER; note = 2'-O-methyl guanosine
  modified_base 28: mod_base = OTHER; note = 2'-O-methyl guanosine
  modified_base 29: mod_base = OTHER; note = 2'-O-methyl uridine
  modified_base 30: mod_base = OTHER; note = 2'-O-methyl adenosine
  modified_base 31: mod_base = OTHER; note = 2'-O-methyl guanosine
  modified_base 32: mod_base = OTHER; note = 2'-O-methyl cytidine
  modified_base 33: mod_base = OTHER; note = Deoxythymidine phosphorothioate
  modified_base 35: mod_base = OTHER; note = Deoxycytidine phosphorothioate
  modified_base 38: mod_base = OTHER; note = 2'-O-methyl uridine
  modified_base 39: mod_base = OTHER; note = 2'-O-methyl uridine
  modified_base 40: mod_base = OTHER; note = 2'-O-methyl cytidine
  modified_base 41: mod_base = OTHER; note = 2'-O-methyl uridine
  modified_base 42: mod_base = OTHER; note = 2'-O-methyl cytidine
  modified_base 43: mod_base = OTHER; note = 2'-O-methyl adenosine
  modified_base 44: mod_base = OTHER; note = 2'-O-methyl uridine
  modified_base 45: mod_base = OTHER; note = 2'-O-methyl uridine phosphorothioate
  modified_base 46: mod_base = OTHER; note = 2'-O-methyl uridine phosphorothioate
  modified_base 47: mod_base = OTHER; note = 2'-O-methyl cytidine phosphorothioate
  modified_base 48: mod_base = OTHER; note = 2'-O-methyl guanosine
  misc_feature 1..6: note = RNA
  misc_feature 7: note = DNA
  misc_feature 8..32: note = RNA
  misc_feature 33: note = DNA
  misc_feature 34: note = RNA
  misc_feature 35: note = DNA
  misc_feature 36..48: note = RNA

SEQ ID NO: 388 - DNA, 48 bp, synthetic construct; identical to SEQ ID NO: 317
  source 1..48: mol_type = other DNA
  modified_base 1: mod_base = OTHER; note = 2'-O-methyl cytidine phosphorothioate
  modified_base 2: mod_base = OTHER; note = 2'-O-methyl uridine phosphorothioate
  modified_base 3: mod_base = OTHER; note = 2'-O-methyl guanosine phosphorothioate
  modified_base 4: mod_base = OTHER; note = 2'-O-methyl adenosine
  modified_base 5: mod_base = OTHER; note = 2'-O-methyl adenosine
  modified_base 6: mod_base = OTHER; note = 2'-O-methyl cytidine
  modified_base 7: mod_base = OTHER; note = Deoxythymidine phosphorothioate
  modified_base 8: mod_base = OTHER; note = 2'-O-methyl uridine
  modified_base 9: mod_base = OTHER; note = 2'-O-methyl guanosine
  modified_base 10: mod_base = OTHER; note = 2'-O-methyl uridine
  modified_base 11: mod_base = OTHER; note = 2'-O-methyl guanosine
  modified_base 12: mod_base = OTHER; note = 2'-fluoro guanosine
  modified_base 13: mod_base = OTHER; note = 2'-O-methyl cytidine
  modified_base 14: mod_base = OTHER; note = 2'-fluoro cytidine
  modified_base 15: mod_base = OTHER; note = 2'-O-methyl guanosine
  modified_base 16: mod_base = OTHER; note = 2'-fluoro uridine
  modified_base 17: mod_base = OTHER; note = 2'-O-methyl uridine
  modified_base 18: mod_base = OTHER; note = 2'-O-methyl uridine
  modified_base 19: mod_base = OTHER; note = 2'-O-methyl adenosine
  modified_base 20: mod_base = OTHER; note = 2'-O-methyl cytidine
  modified_base 21: mod_base = OTHER; note = 2'-fluoro guanosine
  modified_base 22: mod_base = OTHER; note = 2'-O-methyl uridine
  modified_base 23: mod_base = OTHER; note = 2'-O-methyl cytidine
  modified_base 24: mod_base = OTHER; note = 2'-O-methyl guanosine
  modified_base 25: mod_base = OTHER; note = 2'-O-methyl guanosine
  modified_base 28: mod_base = OTHER; note = 2'-O-methyl guanosine
  modified_base 29: mod_base = OTHER; note = 2'-O-methyl uridine
  modified_base 30: mod_base = OTHER; note = 2'-O-methyl adenosine
  modified_base 31: mod_base = OTHER; note = 2'-O-methyl guanosine
  modified_base 32: mod_base = OTHER; note = 2'-O-methyl cytidine
  modified_base 33: mod_base = OTHER; note = Deoxythymidine phosphorothioate
  modified_base 37: mod_base = OTHER; note = Deoxythymidine phosphorothioate
  modified_base 38: mod_base = OTHER; note = 2'-O-methyl uridine
  modified_base 39: mod_base = OTHER; note = 2'-O-methyl uridine
  modified_base 40: mod_base = OTHER; note = 2'-O-methyl cytidine
  modified_base 41: mod_base = OTHER; note = 2'-O-methyl uridine
  modified_base 42: mod_base = OTHER; note = 2'-O-methyl cytidine
  modified_base 43: mod_base = OTHER; note = 2'-O-methyl adenosine
  modified_base 44: mod_base = OTHER; note = 2'-O-methyl uridine
  modified_base 45: mod_base = OTHER; note = 2'-O-methyl uridine phosphorothioate
  modified_base 46: mod_base = OTHER; note = 2'-O-methyl uridine phosphorothioate
  modified_base 47: mod_base = OTHER; note = 2'-O-methyl cytidine phosphorothioate
  modified_base 48: mod_base = OTHER; note = 2'-O-methyl guanosine
  misc_feature 1..6: note = RNA
  misc_feature 7: note = DNA
  misc_feature 8..32: note = RNA
  misc_feature 33: note = DNA
  misc_feature 34..36: note = RNA
  misc_feature 37: note = DNA
  misc_feature 38..48: note = RNA

SEQ ID NO: 389 - DNA, 48 bp, synthetic construct; identical to SEQ ID NO: 317
  source 1..48: mol_type = other DNA
  modified_base 1: mod_base = OTHER; note = 2'-O-methyl cytidine phosphorothioate
  modified_base 2: mod_base = OTHER; note = 2'-O-methyl uridine phosphorothioate
  modified_base 3: mod_base = OTHER; note = 2'-O-methyl guanosine phosphorothioate
  modified_base 4: mod_base = OTHER; note = 2'-O-methyl adenosine
  modified_base 5: mod_base = OTHER; note = 2'-O-methyl adenosine
  modified_base 6: mod_base = OTHER; note = 2'-O-methyl cytidine
  modified_base 7: mod_base = OTHER; note = Deoxythymidine phosphorothioate
  modified_base 8: mod_base = OTHER; note = 2'-O-methyl uridine
  modified_base 9: mod_base = OTHER; note = 2'-O-methyl guanosine
  modified_base 10: mod_base = OTHER; note = 2'-O-methyl uridine
  modified_base 11: mod_base = OTHER; note = 2'-O-methyl guanosine
  modified_base 12: mod_base = OTHER; note = 2'-fluoro guanosine
  modified_base 13: mod_base = OTHER; note = 2'-O-methyl cytidine
  modified_base 14: mod_base = OTHER; note = 2'-fluoro cytidine
  modified_base 15: mod_base = OTHER; note = 2'-O-methyl guanosine
  modified_base 16: mod_base = OTHER; note = 2'-fluoro uridine
  modified_base 17: mod_base = OTHER; note = 2'-O-methyl uridine
  modified_base 18: mod_base = OTHER; note = 2'-O-methyl uridine
  modified_base 19: mod_base = OTHER; note = 2'-O-methyl adenosine
  modified_base 20: mod_base = OTHER; note = 2'-O-methyl cytidine
  modified_base 21: mod_base = OTHER; note = 2'-fluoro guanosine
  modified_base 22: mod_base = OTHER; note = 2'-O-methyl uridine
  modified_base 23: mod_base = OTHER; note = 2'-O-methyl cytidine
  modified_base 24: mod_base = OTHER; note = 2'-O-methyl guanosine
  modified_base 25: mod_base = OTHER; note = 2'-O-methyl guanosine
  modified_base 28: mod_base = OTHER; note = 2'-O-methyl guanosine
  modified_base 29: mod_base = OTHER; note = 2'-O-methyl uridine
  modified_base 30: mod_base = OTHER; note = 2'-O-methyl adenosine
  modified_base 31: mod_base = OTHER; note = 2'-O-methyl guanosine
  modified_base 32: mod_base = OTHER; note = 2'-O-methyl cytidine
  modified_base 33: mod_base = OTHER; note = Deoxythymidine phosphorothioate
  modified_base 35: mod_base = OTHER; note = 2'-O-methyl cytidine
  modified_base 38: mod_base = OTHER; note = 2'-O-methyl uridine
  modified_base 39: mod_base = OTHER; note = 2'-O-methyl uridine
  modified_base 40: mod_base = OTHER; note = 2'-O-methyl cytidine
  modified_base 41: mod_base = OTHER; note = 2'-O-methyl uridine
  modified_base 42: mod_base = OTHER; note = 2'-O-methyl cytidine
  modified_base 43: mod_base = OTHER; note = 2'-O-methyl adenosine
  modified_base 44: mod_base = OTHER; note = 2'-O-methyl uridine
  modified_base 45: mod_base = OTHER; note = 2'-O-methyl uridine phosphorothioate
  modified_base 46: mod_base = OTHER; note = 2'-O-methyl uridine phosphorothioate
  modified_base 47: mod_base = OTHER; note = 2'-O-methyl cytidine phosphorothioate
  modified_base 48: mod_base = OTHER; note = 2'-O-methyl guanosine
  misc_feature 1..6: note = RNA
  misc_feature 7: note = DNA
  misc_feature 8..32: note = RNA
  misc_feature 33: note = DNA
  misc_feature 34..48: note = RNA

SEQ ID NO: 390 - DNA, 48 bp, synthetic construct; identical to SEQ ID NO: 317
  source 1..48: mol_type = other DNA
  modified_base 1: mod_base = OTHER; note = 2'-O-methyl cytidine phosphorothioate
  modified_base 2: mod_base = OTHER; note = 2'-O-methyl uridine phosphorothioate
  modified_base 3: mod_base = OTHER; note = 2'-O-methyl guanosine phosphorothioate
  modified_base 4: mod_base = OTHER; note = 2'-O-methyl adenosine
  modified_base 5: mod_base = OTHER; note = 2'-O-methyl adenosine
  modified_base 6: mod_base = OTHER; note = 2'-O-methyl cytidine
  modified_base 7: mod_base = OTHER; note = Deoxythymidine phosphorothioate
  modified_base 8: mod_base = OTHER; note = 2'-O-methyl uridine
  modified_base 9: mod_base = OTHER; note = 2'-O-methyl guanosine
  modified_base 10: mod_base = OTHER; note = 2'-O-methyl uridine
  modified_base 11: mod_base = OTHER; note = 2'-O-methyl guanosine
  modified_base 12: mod_base = OTHER; note = 2'-fluoro guanosine
  modified_base 13: mod_base = OTHER; note = 2'-O-methyl cytidine
  modified_base 14: mod_base = OTHER; note = 2'-fluoro cytidine
  modified_base 15: mod_base = OTHER; note = 2'-O-methyl guanosine
  modified_base 16: mod_base = OTHER; note = 2'-fluoro uridine
  modified_base 17: mod_base = OTHER; note = 2'-O-methyl uridine
  modified_base 18: mod_base = OTHER; note = 2'-O-methyl uridine
  modified_base 19: mod_base = OTHER; note = 2'-O-methyl adenosine
  modified_base 20: mod_base = OTHER; note = 2'-O-methyl cytidine
  modified_base 21: mod_base = OTHER; note = 2'-fluoro guanosine
  modified_base 22: mod_base = OTHER; note = 2'-O-methyl uridine
  modified_base 23: mod_base = OTHER; note = 2'-O-methyl cytidine
  modified_base 24: mod_base = OTHER; note = 2'-O-methyl guanosine
  modified_base 25: mod_base = OTHER; note = 2'-O-methyl guanosine
  modified_base 28: mod_base = OTHER; note = 2'-O-methyl guanosine
  modified_base 29: mod_base = OTHER; note = 2'-O-methyl uridine
  modified_base 30: mod_base = OTHER; note = 2'-O-methyl adenosine
  modified_base 31: mod_base = OTHER; note = 2'-O-methyl guanosine
  modified_base 32: mod_base = OTHER; note = 2'-O-methyl cytidine
  modified_base 33: mod_base = OTHER; note = Deoxythymidine phosphorothioate
  modified_base 35: mod_base = OTHER; note = Deoxycytidine phosphorothioate
  modified_base 36: mod_base = OTHER; note = Deoxycytidine phosphorothioate
  modified_base 38: mod_base = OTHER; note = 2'-O-methyl uridine
  modified_base 39: mod_base = OTHER; note = 2'-O-methyl uridine
  modified_base 40: mod_base = OTHER; note = 2'-O-methyl cytidine
  modified_base 41: mod_base = OTHER; note = 2'-O-methyl uridine
  modified_base 42: mod_base = OTHER; note = 2'-O-methyl cytidine
  modified_base 43: mod_base = OTHER; note = 2'-O-methyl adenosine
  modified_base 44: mod_base = OTHER; note = 2'-O-methyl uridine
  modified_base 45: mod_base = OTHER; note = 2'-O-methyl uridine phosphorothioate
  modified_base 46: mod_base = OTHER; note = 2'-O-methyl uridine phosphorothioate
  modified_base 47: mod_base = OTHER; note = 2'-O-methyl cytidine phosphorothioate
  modified_base 48: mod_base = OTHER; note = 2'-O-methyl guanosine
  misc_feature 1..6: note = RNA
  misc_feature 7: note = DNA
  misc_feature 8..32: note = RNA
  misc_feature 33: note = DNA
  misc_feature 34: note = RNA
  misc_feature 35..36: note = DNA
  misc_feature 37..48: note = RNA

SEQ ID NO: 391 - DNA, 48 bp, synthetic construct; identical to SEQ ID NO: 317
  source 1..48: mol_type = other DNA
  modified_base 1: mod_base = OTHER; note = 2'-O-methyl cytidine phosphorothioate
  modified_base 2: mod_base = OTHER; note = 2'-O-methyl uridine phosphorothioate
  modified_base 3: mod_base = OTHER; note = 2'-O-methyl guanosine phosphorothioate
  modified_base 4: mod_base = OTHER; note = 2'-O-methyl adenosine
  modified_base 5: mod_base = OTHER; note = 2'-O-methyl adenosine
  modified_base 6: mod_base = OTHER; note = 2'-O-methyl cytidine
  modified_base 7: mod_base = OTHER; note = Deoxythymidine phosphorothioate
  modified_base 8: mod_base = OTHER; note = 2'-O-methyl uridine
  modified_base 9: mod_base = OTHER; note = 2'-O-methyl guanosine
  modified_base 10: mod_base = OTHER; note = 2'-O-methyl uridine
  modified_base 11: mod_base = OTHER; note = 2'-O-methyl guanosine
  modified_base 12: mod_base = OTHER; note = 2'-fluoro guanosine
  modified_base 13: mod_base = OTHER; note = 2'-O-methyl cytidine
  modified_base 14: mod_base = OTHER; note = 2'-fluoro cytidine
  modified_base 15: mod_base = OTHER; note = 2'-O-methyl guanosine
  modified_base 16: mod_base = OTHER; note = 2'-fluoro uridine
  modified_base 17: mod_base = OTHER; note = 2'-O-methyl uridine
  modified_base 18: mod_base = OTHER; note = 2'-O-methyl uridine
  modified_base 19: mod_base = OTHER; note = 2'-O-methyl adenosine
  modified_base 20: mod_base = OTHER; note = 2'-O-methyl cytidine
  modified_base 21: mod_base = OTHER; note = 2'-fluoro guanosine
  modified_base 22: mod_base = OTHER; note = 2'-O-methyl uridine
  modified_base 23: mod_base = OTHER; note = 2'-O-methyl cytidine
  modified_base 24: mod_base = OTHER; note = 2'-O-methyl guanosine
  modified_base 25: mod_base = OTHER; note = 2'-O-methyl guanosine
  modified_base 28: mod_base = OTHER; note = 2'-O-methyl guanosine
  modified_base 29: mod_base = OTHER; note = 2'-O-methyl uridine
  modified_base 30: mod_base = OTHER; note = 2'-O-methyl adenosine
  modified_base 31: mod_base = OTHER; note = 2'-O-methyl guanosine
  modified_base 32: mod_base = OTHER; note = 2'-O-methyl cytidine
  modified_base 33: mod_base = OTHER; note = Deoxythymidine phosphorothioate
  modified_base 35: mod_base = OTHER; note = Deoxycytidine phosphorothioate
  modified_base 37: mod_base = OTHER; note = Deoxythymidine phosphorothioate
  modified_base 38: mod_base = OTHER; note = 2'-O-methyl uridine
  modified_base 39: mod_base = OTHER; note = 2'-O-methyl uridine
  modified_base 40: mod_base = OTHER; note = 2'-O-methyl cytidine
  modified_base 41: mod_base = OTHER; note = 2'-O-methyl uridine
  modified_base 42: mod_base = OTHER; note = 2'-O-methyl cytidine
  modified_base 43: mod_base = OTHER; note = 2'-O-methyl adenosine
  modified_base 44: mod_base = OTHER; note = 2'-O-methyl uridine
  modified_base 45: mod_base = OTHER; note = 2'-O-methyl uridine phosphorothioate
  modified_base 46: mod_base = OTHER; note = 2'-O-methyl uridine phosphorothioate
  modified_base 47: mod_base = OTHER; note = 2'-O-methyl cytidine phosphorothioate
  modified_base 48: mod_base = OTHER; note = 2'-O-methyl guanosine
  misc_feature 1..6: note = RNA
  misc_feature 7: note = DNA
  misc_feature 8..32: note = RNA
  misc_feature 33: note = DNA
  misc_feature 34: note = RNA
  misc_feature 35: note = DNA
  misc_feature 36: note = RNA
  misc_feature 37: note = DNA
  misc_feature 38..48: note = RNA

SEQ ID NO: 392 - DNA, 48 bp, synthetic construct; identical to SEQ ID NO: 317
  source 1..48: mol_type = other DNA
  modified_base 1: mod_base = OTHER; note = 2'-O-methyl cytidine phosphorothioate
  modified_base 2: mod_base = OTHER; note = 2'-O-methyl uridine phosphorothioate
  modified_base 3: mod_base = OTHER; note = 2'-O-methyl guanosine phosphorothioate
  modified_base 4: mod_base = OTHER; note = 2'-O-methyl adenosine
  modified_base 5: mod_base = OTHER; note = 2'-O-methyl adenosine
  modified_base 6: mod_base = OTHER; note = 2'-O-methyl cytidine
  modified_base 7: mod_base = OTHER; note = Deoxythymidine phosphorothioate
  modified_base 8: mod_base = OTHER; note = 2'-O-methyl uridine
  modified_base 9: mod_base = OTHER; note = 2'-O-methyl guanosine
  modified_base 10: mod_base = OTHER; note = 2'-O-methyl uridine
  modified_base 11: mod_base = OTHER; note = 2'-O-methyl guanosine
  modified_base 12: mod_base = OTHER; note = 2'-fluoro guanosine
  modified_base 13: mod_base = OTHER; note = 2'-O-methyl cytidine
  modified_base 14: mod_base = OTHER; note = 2'-fluoro cytidine
  modified_base 15: mod_base = OTHER; note = 2'-O-methyl guanosine
  modified_base 16: mod_base = OTHER; note = 2'-fluoro uridine
  modified_base 17: mod_base = OTHER; note = 2'-O-methyl uridine
  modified_base 18: mod_base = OTHER; note = 2'-O-methyl uridine
  modified_base 19: mod_base = OTHER; note = 2'-O-methyl adenosine
  modified_base 20: mod_base = OTHER; note = 2'-O-methyl cytidine
  modified_base 21: mod_base = OTHER; note = 2'-fluoro guanosine
  modified_base 22: mod_base = OTHER; note = 2'-O-methyl uridine
  modified_base 23: mod_base = OTHER; note = 2'-O-methyl cytidine
  modified_base 24: mod_base = OTHER; note = 2'-O-methyl guanosine
  modified_base 25: mod_base = OTHER; note = 2'-O-methyl guanosine
  modified_base 28: mod_base = OTHER; note = 2'-O-methyl guanosine
  modified_base 29: mod_base = OTHER; note = 2'-O-methyl uridine
  modified_base 30: mod_base = OTHER; note = 2'-O-methyl adenosine
  modified_base 31: mod_base = OTHER; note = 2'-O-methyl guanosine
  modified_base 32: mod_base = OTHER; note = 2'-O-methyl cytidine
  modified_base 33: mod_base = OTHER; note = Deoxythymidine phosphorothioate
  modified_base 35: mod_base = OTHER; note = Deoxycytidine phosphorothioate
  modified_base 36: mod_base = OTHER; note = Deoxycytidine phosphorothioate
  modified_base 37: mod_base = OTHER; note = Deoxythymidine phosphorothioate
  modified_base 38: mod_base = OTHER; note = 2'-O-methyl uridine
  modified_base 39: mod_base = OTHER; note = 2'-O-methyl uridine
  modified_base 40: mod_base = OTHER; note = 2'-O-methyl cytidine
  modified_base 41: mod_base = OTHER; note = 2'-O-methyl uridine
  modified_base 42: mod_base = OTHER; note = 2'-O-methyl cytidine
  modified_base 43: mod_base = OTHER; note = 2'-O-methyl adenosine
  modified_base 44: mod_base = OTHER; note = 2'-O-methyl uridine
  modified_base 45: mod_base = OTHER; note = 2'-O-methyl uridine phosphorothioate
  modified_base 46: mod_base = OTHER; note = 2'-O-methyl uridine phosphorothioate
  modified_base 47: mod_base = OTHER; note = 2'-O-methyl cytidine phosphorothioate
  modified_base 48: mod_base = OTHER; note = 2'-O-methyl guanosine
  misc_feature 1..6: note = RNA
  misc_feature 7: note = DNA
  misc_feature 8..32: note = RNA
  misc_feature 33: note = DNA
  misc_feature 34: note = RNA
  misc_feature 35..37: note = DNA
  misc_feature 38..48: note = RNA

SEQ ID NO: 393 - DNA, 48 bp, synthetic construct; identical to SEQ ID NO: 317
  source 1..48: mol_type = other DNA
  modified_base 1: mod_base = OTHER; note = 2'-O-methyl cytidine phosphorothioate
  modified_base 2: mod_base = OTHER; note = 2'-O-methyl uridine phosphorothioate
  modified_base 3: mod_base = OTHER; note = 2'-O-methyl guanosine phosphorothioate
  modified_base 4: mod_base = OTHER; note = 2'-O-methyl adenosine
  modified_base 5: mod_base = OTHER; note = 2'-O-methyl adenosine
  modified_base 6: mod_base = OTHER; note = 2'-O-methyl cytidine
  modified_base 7: mod_base = OTHER; note = Deoxythymidine phosphorothioate
  modified_base 8: mod_base = OTHER; note = 2'-O-methyl uridine
  modified_base 9: mod_base = OTHER; note = 2'-O-methyl guanosine
  modified_base 10: mod_base = OTHER; note = 2'-O-methyl uridine
  modified_base 11: mod_base = OTHER; note = 2'-O-methyl guanosine
  modified_base 12: mod_base = OTHER; note = 2'-fluoro guanosine
  modified_base 13: mod_base = OTHER; note = 2'-O-methyl cytidine
  modified_base 14: mod_base = OTHER; note = 2'-fluoro cytidine
  modified_base 15: mod_base = OTHER; note = 2'-O-methyl guanosine
  modified_base 16: mod_base = OTHER; note = 2'-fluoro uridine
  modified_base 17: mod_base = OTHER; note = 2'-O-methyl uridine
  modified_base 18: mod_base = OTHER; note = 2'-O-methyl uridine
  modified_base 19: mod_base = OTHER; note = 2'-O-methyl adenosine
  modified_base 20: mod_base = OTHER; note = 2'-O-methyl cytidine
  modified_base 21: mod_base = OTHER; note = 2'-fluoro guanosine
  modified_base 22: mod_base = OTHER; note = 2'-O-methyl uridine
  modified_base 23: mod_base = OTHER; note = 2'-O-methyl cytidine
  modified_base 24: mod_base = OTHER; note = 2'-O-methyl guanosine
  modified_base 25: mod_base = OTHER; note = 2'-O-methyl guanosine
  modified_base 28: mod_base = OTHER; note = 2'-O-methyl guanosine
  modified_base 29: mod_base = OTHER; note = 2'-O-methyl uridine
  modified_base 30: mod_base = OTHER; note = 2'-O-methyl adenosine
  modified_base 31: mod_base = OTHER; note = 2'-O-methyl guanosine
  modified_base 32: mod_base = OTHER; note = 2'-O-methyl cytidine
  modified_base 33: mod_base = OTHER; note = Deoxythymidine phosphorothioate
  modified_base 35: mod_base = OTHER; note = 2'-O-methyl cytidine
  modified_base 36: mod_base = OTHER; note = Deoxycytidine phosphorothioate
  modified_base 38: mod_base = OTHER; note = 2'-O-methyl uridine
  modified_base 39: mod_base = OTHER; note = 2'-O-methyl uridine
  modified_base 40: mod_base = OTHER; note = 2'-O-methyl cytidine
  modified_base 41: mod_base = OTHER; note = 2'-O-methyl uridine
  modified_base 42: mod_base = OTHER; note = 2'-O-methyl cytidine
  modified_base 43: mod_base = OTHER; note = 2'-O-methyl adenosine
  modified_base 44: mod_base = OTHER; note = 2'-O-methyl uridine
  modified_base 45: mod_base = OTHER; note = 2'-O-methyl uridine phosphorothioate
  modified_base 46: mod_base = OTHER; note = 2'-O-methyl uridine phosphorothioate
  modified_base 47: mod_base = OTHER; note = 2'-O-methyl cytidine phosphorothioate
  modified_base 48: mod_base = OTHER; note = 2'-O-methyl guanosine
  misc_feature 1..6: note = RNA
  misc_feature 7: note = DNA
  misc_feature 8..32: note = RNA
  misc_feature 33: note = DNA
  misc_feature 34..35: note = RNA
  misc_feature 36: note = DNA
  misc_feature 37..48: note = RNA

SEQ ID NO: 394 - DNA, 48 bp, synthetic construct; identical to SEQ ID NO: 317
  source 1..48: mol_type = other DNA
  modified_base 1: mod_base = OTHER; note = 2'-O-methyl cytidine phosphorothioate
  modified_base 2: mod_base = OTHER; note = 2'-O-methyl uridine phosphorothioate
  modified_base 3: mod_base = OTHER; note = 2'-O-methyl guanosine phosphorothioate
  modified_base 4: mod_base = OTHER; note = 2'-O-methyl adenosine
  modified_base 5: mod_base = OTHER; note = 2'-O-methyl adenosine
  modified_base 6: mod_base = OTHER; note = 2'-O-methyl cytidine
  modified_base 7: mod_base = OTHER; note = Deoxythymidine phosphorothioate
  modified_base 8: mod_base = OTHER; note = 2'-O-methyl uridine
  modified_base 9: mod_base = OTHER; note = 2'-O-methyl guanosine
  modified_base 10: mod_base = OTHER; note = 2'-O-methyl uridine
  modified_base 11: mod_base = OTHER; note = 2'-O-methyl guanosine
  modified_base 12: mod_base = OTHER; note = 2'-fluoro guanosine
  modified_base 13: mod_base = OTHER; note = 2'-O-methyl cytidine
  modified_base 14: mod_base = OTHER; note = 2'-fluoro cytidine
  modified_base 15: mod_base = OTHER; note = 2'-O-methyl guanosine
  modified_base 16: mod_base = OTHER; note = 2'-fluoro uridine
  modified_base 17: mod_base = OTHER; note = 2'-O-methyl uridine
  modified_base 18: mod_base = OTHER; note = 2'-O-methyl uridine
  modified_base 19: mod_base = OTHER; note = 2'-O-methyl adenosine
  modified_base 20: mod_base = OTHER; note = 2'-O-methyl cytidine
  modified_base 21: mod_base = OTHER; note = 2'-fluoro guanosine
  modified_base 22: mod_base = OTHER; note = 2'-O-methyl uridine
  modified_base 23: mod_base = OTHER; note = 2'-O-methyl cytidine
  modified_base 24: mod_base = OTHER; note = 2'-O-methyl guanosine
  modified_base 25: mod_base = OTHER; note = 2'-O-methyl guanosine
  modified_base 28: mod_base = OTHER; note = 2'-O-methyl guanosine
  modified_base 29: mod_base = OTHER; note = 2'-O-methyl uridine
  modified_base 30: mod_base = OTHER; note = 2'-O-methyl adenosine
  modified_base 31: mod_base = OTHER; note = 2'-O-methyl guanosine
  modified_base 32: mod_base = OTHER; note = 2'-O-methyl cytidine
  modified_base 33: mod_base = OTHER; note = Deoxythymidine phosphorothioate
  modified_base 35: mod_base = OTHER; note = 2'-O-methyl cytidine
  modified_base 37: mod_base = OTHER; note = Deoxythymidine phosphorothioate
  modified_base 38: mod_base = OTHER; note = 2'-O-methyl uridine
  modified_base 39: mod_base = OTHER; note = 2'-O-methyl uridine
  modified_base 40: mod_base = OTHER; note = 2'-O-methyl cytidine
  modified_base 41: mod_base = OTHER; note = 2'-O-methyl uridine
  modified_base 42: mod_base = OTHER; note = 2'-O-methyl cytidine
  modified_base 43: mod_base = OTHER; note = 2'-O-methyl adenosine
  modified_base 44: mod_base = OTHER; note = 2'-O-methyl uridine
  modified_base 45: mod_base = OTHER; note = 2'-O-methyl uridine phosphorothioate
  modified_base 46: mod_base = OTHER; note = 2'-O-methyl uridine phosphorothioate
  modified_base 47: mod_base = OTHER; note = 2'-O-methyl cytidine phosphorothioate
  modified_base 48: mod_base = OTHER; note = 2'-O-methyl guanosine
  misc_feature 1..6: note = RNA
  misc_feature 7: note = DNA
  misc_feature 8..32: note = RNA
  misc_feature 33: note = DNA
  misc_feature 34..36: note = RNA
  misc_feature 37: note = DNA
  misc_feature 38..48: note = RNA

SEQ ID NO: 395 - DNA, 48 bp, synthetic construct; identical to SEQ ID NO: 317
  source 1..48: mol_type = other DNA
  modified_base 1: mod_base = OTHER; note = 2'-O-methyl cytidine phosphorothioate
  modified_base 2: mod_base = OTHER; note = 2'-O-methyl uridine phosphorothioate
  modified_base 3: mod_base = OTHER; note = 2'-O-methyl guanosine phosphorothioate
  modified_base 4: mod_base = OTHER; note = 2'-O-methyl adenosine
  modified_base 5: mod_base = OTHER; note = 2'-O-methyl adenosine
  modified_base 6: mod_base = OTHER; note = 2'-O-methyl cytidine
  modified_base 7: mod_base = OTHER; note = Deoxythymidine phosphorothioate
  modified_base 8: mod_base = OTHER; note = 2'-O-methyl uridine
  modified_base 9: mod_base = OTHER; note = 2'-O-methyl guanosine
  modified_base 10: mod_base = OTHER; note = 2'-O-methyl uridine
  modified_base 11: mod_base = OTHER; note = 2'-O-methyl guanosine
  modified_base 12: mod_base = OTHER; note = 2'-fluoro guanosine
  modified_base 13: mod_base = OTHER; note = 2'-O-methyl cytidine
  modified_base 14: mod_base = OTHER; note = 2'-fluoro cytidine
  modified_base 15: mod_base = OTHER; note = 2'-O-methyl guanosine
  modified_base 16: mod_base = OTHER; note = 2'-fluoro uridine
  modified_base 17: mod_base = OTHER; note = 2'-O-methyl uridine
  modified_base 18: mod_base = OTHER; note = 2'-O-methyl uridine
  modified_base 19: mod_base = OTHER; note = 2'-O-methyl adenosine
  modified_base 20: mod_base = OTHER; note = 2'-O-methyl cytidine
  modified_base 21: mod_base = OTHER; note = 2'-fluoro guanosine
  modified_base 22: mod_base = OTHER; note = 2'-O-methyl uridine
  modified_base 23: mod_base = OTHER; note = 2'-O-methyl cytidine
  modified_base 24: mod_base = OTHER; note = 2'-O-methyl guanosine
  modified_base 25: mod_base = OTHER; note = 2'-O-methyl guanosine
  modified_base 28: mod_base = OTHER; note = 2'-O-methyl guanosine
  modified_base 29: mod_base = OTHER; note = 2'-O-methyl uridine
  modified_base 30: mod_base = OTHER; note = 2'-O-methyl adenosine
  modified_base 31: mod_base = OTHER; note = 2'-O-methyl guanosine
  modified_base 32: mod_base = OTHER; note = 2'-O-methyl cytidine
  modified_base 33: mod_base = OTHER; note = Deoxythymidine phosphorothioate
  modified_base 35: mod_base = OTHER; note = 2'-O-methyl cytidine
  modified_base 36: mod_base = OTHER; note = Deoxycytidine phosphorothioate
  modified_base 37: mod_base = OTHER; note = Deoxythymidine phosphorothioate
  modified_base 38: mod_base = OTHER; note = 2'-O-methyl uridine
  modified_base 39: mod_base = OTHER; note = 2'-O-methyl uridine
  modified_base 40: mod_base = OTHER; note = 2'-O-methyl cytidine
  modified_base 41: mod_base = OTHER; note = 2'-O-methyl uridine
  modified_base 42: mod_base = OTHER; note = 2'-O-methyl cytidine
  modified_base 43: mod_base = OTHER; note = 2'-O-methyl adenosine
  modified_base 44: mod_base = OTHER; note = 2'-O-methyl uridine
  modified_base 45: mod_base = OTHER; note = 2'-O-methyl uridine phosphorothioate
  modified_base 46: mod_base = OTHER; note = 2'-O-methyl uridine phosphorothioate
  modified_base 47: mod_base = OTHER; note = 2'-O-methyl cytidine phosphorothioate
  modified_base 48: mod_base = OTHER; note = 2'-O-methyl guanosine
  misc_feature 1..6: note = RNA
  misc_feature 7: note = DNA
  misc_feature 8..32: note = RNA
  misc_feature 33: note = DNA
  misc_feature 34..35: note = RNA
  misc_feature 36..37: note = DNA
  misc_feature 38..48: note = RNA

SEQ ID NO: 396 - DNA, 48 bp, synthetic construct; identical to SEQ ID NO: 317
  source 1..48: mol_type = other DNA
  modified_base 1: mod_base = OTHER; note = 2'-O-methyl cytidine phosphorothioate
  modified_base 2: mod_base = OTHER; note = 2'-O-methyl uridine phosphorothioate
  modified_base 3: mod_base = OTHER; note = 2'-O-methyl guanosine phosphorothioate
  modified_base 4: mod_base = OTHER; note = 2'-O-methyl adenosine
  modified_base 5: mod_base = OTHER; note = 2'-O-methyl adenosine
  modified_base 6: mod_base = OTHER; note = 2'-O-methyl cytidine
  modified_base 7: mod_base = OTHER; note = Deoxythymidine phosphorothioate
  modified_base 8: mod_base = OTHER; note = 2'-O-methyl uridine
  modified_base 9: mod_base = OTHER; note = 2'-O-methyl guanosine
  modified_base 10: mod_base = OTHER; note = 2'-O-methyl uridine
  modified_base 11: mod_base = OTHER; note = 2'-O-methyl guanosine
  modified_base 12: mod_base = OTHER; note = 2'-fluoro guanosine
  modified_base 13: mod_base = OTHER; note = 2'-O-methyl cytidine
  modified_base 14: mod_base = OTHER; note = 2'-fluoro cytidine
  modified_base 15: mod_base = OTHER; note = 2'-O-methyl guanosine
  modified_base 16: mod_base = OTHER; note = 2'-fluoro uridine
  modified_base 17: mod_base = OTHER; note = 2'-O-methyl uridine
  modified_base 18: mod_base = OTHER; note = 2'-O-methyl uridine
  modified_base 19: mod_base = OTHER; note = 2'-O-methyl adenosine
  modified_base 20: mod_base = OTHER; note = 2'-O-methyl cytidine
  modified_base 21: mod_base = OTHER; note = 2'-fluoro guanosine
  modified_base 22: mod_base = OTHER; note = 2'-O-methyl uridine
  modified_base 23: mod_base = OTHER; note = 2'-O-methyl cytidine
  modified_base 24: mod_base = OTHER; note = 2'-O-methyl guanosine
  modified_base 25: mod_base = OTHER; note = 2'-O-methyl guanosine
  modified_base 28: mod_base = OTHER; note = 2'-O-methyl guanosine
  modified_base 29: mod_base = OTHER; note = 2'-O-methyl uridine
  modified_base 30: mod_base = OTHER; note = 2'-O-methyl adenosine
  modified_base 31: mod_base = OTHER; note = 2'-O-methyl guanosine
  modified_base 32: mod_base = OTHER; note = 2'-O-methyl cytidine
  modified_base 33: mod_base = OTHER; note = Deoxythymidine phosphorothioate
  modified_base 35: mod_base = OTHER; note = 2'-O-methyl cytidine
  modified_base 36: mod_base = OTHER; note = 2'-O-methyl cytidine
  modified_base 38: mod_base = OTHER; note = 2'-O-methyl uridine
  modified_base 39: mod_base = OTHER; note = 2'-O-methyl uridine
  modified_base 40: mod_base = OTHER; note = 2'-O-methyl cytidine
  modified_base 41: mod_base = OTHER; note = 2'-O-methyl uridine
  modified_base 42: mod_base = OTHER; note = 2'-O-methyl cytidine
  modified_base 43: mod_base = OTHER; note = 2'-O-methyl adenosine
  modified_base 44: mod_base = OTHER; note = 2'-O-methyl uridine
  modified_base 45: mod_base = OTHER; note = 2'-O-methyl uridine phosphorothioate
  modified_base 46: mod_base = OTHER; note = 2'-O-methyl uridine phosphorothioate
  modified_base 47: mod_base = OTHER; note = 2'-O-methyl cytidine phosphorothioate
  modified_base 48: mod_base = OTHER; note = 2'-O-methyl guanosine
  misc_feature 1..6: note = RNA
  misc_feature 7: note = DNA
  misc_feature 8..32: note = RNA
  misc_feature 33: note = DNA
  misc_feature 34..48: note = RNA

SEQ ID NO: 397 - DNA, 48 bp, synthetic construct; identical to SEQ ID NO: 317
  source 1..48: mol_type = other DNA
  modified_base 1: mod_base = OTHER; note = 2'-O-methyl cytidine phosphorothioate
  modified_base 2: mod_base = OTHER; note = 2'-O-methyl uridine phosphorothioate
  modified_base 3: mod_base = OTHER; note = 2'-O-methyl guanosine phosphorothioate
  modified_base 4: mod_base = OTHER; note = 2'-O-methyl adenosine
  modified_base 5: mod_base = OTHER; note = 2'-O-methyl adenosine
  modified_base 6: mod_base = OTHER; note = 2'-O-methyl cytidine
  modified_base 7: mod_base = OTHER; note = Deoxythymidine phosphorothioate
  modified_base 8: mod_base = OTHER; note = 2'-O-methyl uridine
  modified_base 9: mod_base = OTHER; note = 2'-O-methyl guanosine
  modified_base 10: mod_base = OTHER; note = 2'-O-methyl uridine
  modified_base 11: mod_base = OTHER; note = 2'-O-methyl guanosine
  modified_base 12: mod_base = OTHER; note = 2'-fluoro guanosine
  modified_base 13: mod_base = OTHER; note = 2'-O-methyl cytidine
  modified_base 14: mod_base = OTHER; note = 2'-fluoro cytidine
  modified_base 15: mod_base = OTHER; note = 2'-O-methyl guanosine
  modified_base 16: mod_base = OTHER; note = 2'-fluoro uridine
  modified_base 17: mod_base = OTHER; note = 2'-O-methyl uridine
  modified_base 18: mod_base = OTHER; note = 2'-O-methyl uridine
  modified_base 19: mod_base = OTHER; note = 2'-O-methyl adenosine
  modified_base 20: mod_base = OTHER; note = 2'-O-methyl cytidine
  modified_base 21: mod_base = OTHER; note = 2'-fluoro guanosine
  modified_base 22: mod_base = OTHER; note = 2'-O-methyl uridine
  modified_base 23: mod_base = OTHER; note = 2'-O-methyl cytidine
  modified_base 24: mod_base = OTHER; note = 2'-O-methyl guanosine
  modified_base 25: mod_base = OTHER; note = 2'-O-methyl guanosine
  modified_base 28: mod_base = OTHER; note = 2'-O-methyl guanosine
  modified_base 29: mod_base = OTHER; note = 2'-O-methyl uridine
  modified_base 30: mod_base = OTHER; note = 2'-O-methyl adenosine
  modified_base 31: mod_base = OTHER; note = 2'-O-methyl guanosine
  modified_base 32: mod_base = OTHER; note = 2'-O-methyl cytidine
  modified_base 33: mod_base = OTHER; note = Deoxythymidine phosphorothioate
  modified_base 35: mod_base = OTHER; note = 2'-O-methyl cytidine
  modified_base 36: mod_base = OTHER; note = 2'-O-methyl cytidine
  modified_base 37: mod_base = OTHER; note = Deoxythymidine phosphorothioate
  modified_base 38: mod_base = OTHER; note = 2'-O-methyl uridine
  modified_base 39: mod_base = OTHER; note = 2'-O-methyl uridine
  modified_base 40: mod_base = OTHER; note = 2'-O-methyl cytidine
  modified_base 41: mod_base = OTHER; note = 2'-O-methyl uridine
  modified_base 42: mod_base = OTHER; note = 2'-O-methyl cytidine
  modified_base 43: mod_base = OTHER; note = 2'-O-methyl adenosine
  modified_base 44: mod_base = OTHER; note = 2'-O-methyl uridine
  modified_base 45: mod_base = OTHER; note = 2'-O-methyl uridine phosphorothioate
  modified_base 46: mod_base = OTHER; note = 2'-O-methyl uridine phosphorothioate
  modified_base 47: mod_base = OTHER; note = 2'-O-methyl cytidine phosphorothioate
  modified_base 48: mod_base = OTHER; note = 2'-O-methyl guanosine
  misc_feature 1..6: note = RNA
  misc_feature 7: note = DNA
  misc_feature 8..32: note = RNA
  misc_feature 33: note = DNA
  misc_feature 34..36: note = RNA
  misc_feature 37: note = DNA
  misc_feature 38..48: note = RNA

SEQ ID NO: 398 - DNA, 48 bp, synthetic construct; identical to SEQ ID NO: 317
  source 1..48: mol_type = other DNA
  modified_base 1: mod_base = OTHER; note = 2'-O-methyl cytidine phosphorothioate
  modified_base 2: mod_base = OTHER; note = 2'-O-methyl uridine phosphorothioate
  modified_base 3: mod_base = OTHER; note = 2'-O-methyl guanosine phosphorothioate
  modified_base 4: mod_base = OTHER; note = 2'-O-methyl adenosine
  modified_base 5: mod_base = OTHER; note = 2'-O-methyl adenosine
  modified_base 6: mod_base = OTHER; note = 2'-O-methyl cytidine
  modified_base 7: mod_base = OTHER; note = Deoxythymidine phosphorothioate
  modified_base 8: mod_base = OTHER; note = 2'-O-methyl uridine
  modified_base 9: mod_base = OTHER; note = 2'-O-methyl guanosine
  modified_base 10: mod_base = OTHER; note = 2'-O-methyl uridine
  modified_base 11: mod_base = OTHER; note = 2'-O-methyl guanosine
  modified_base 12: mod_base = OTHER; note = 2'-fluoro guanosine
  modified_base 13: mod_base = OTHER; note = 2'-O-methyl cytidine
  modified_base 14: mod_base = OTHER; note = 2'-fluoro cytidine
  modified_base 15: mod_base = OTHER; note = 2'-O-methyl guanosine
  modified_base 16: mod_base = OTHER; note = 2'-fluoro uridine
  modified_base 17: mod_base = OTHER; note = 2'-O-methyl uridine
  modified_base 18: mod_base = OTHER; note = 2'-O-methyl uridine
  modified_base 19: mod_base = OTHER; note = 2'-O-methyl adenosine
  modified_base 20: mod_base = OTHER; note = 2'-O-methyl cytidine
  modified_base 21: mod_base = OTHER; note = 2'-fluoro guanosine
  modified_base 22: mod_base = OTHER; note = 2'-O-methyl uridine
  modified_base 23: mod_base = OTHER; note = 2'-O-methyl cytidine
  modified_base 24: mod_base = OTHER; note = 2'-O-methyl guanosine
  modified_base 25: mod_base = OTHER; note = 2'-O-methyl guanosine
  modified_base 26: mod_base = OTHER; note = Deoxythymidine phosphorothioate
  modified_base 28: mod_base = OTHER; note = 2'-O-methyl guanosine
  modified_base 29: mod_base = OTHER; note = 2'-O-methyl uridine
  modified_base 30: mod_base = OTHER; note = 2'-O-methyl adenosine
  modified_base 31: mod_base = OTHER; note = 2'-O-methyl guanosine
  modified_base 32: mod_base = OTHER; note = 2'-O-methyl cytidine
  modified_base 33: mod_base = OTHER; note = Deoxythymidine phosphorothioate
  modified_base 36: mod_base = OTHER; note = Deoxycytidine phosphorothioate
  modified_base 38: mod_base = OTHER; note = 2'-O-methyl uridine
  modified_base 39: mod_base = OTHER; note = 2'-O-methyl uridine
  modified_base 40: mod_base = OTHER; note = 2'-O-methyl cytidine
  modified_base 41: mod_base = OTHER; note = 2'-O-methyl uridine
  modified_base 42: mod_base = OTHER; note = 2'-O-methyl cytidine
  modified_base 43: mod_base = OTHER; note = 2'-O-methyl adenosine
  modified_base 44: mod_base = OTHER; note = 2'-O-methyl uridine
  modified_base 45: mod_base = OTHER; note = 2'-O-methyl uridine phosphorothioate
  modified_base 46: mod_base = OTHER; note = 2'-O-methyl uridine phosphorothioate
  modified_base 47: mod_base = OTHER; note = 2'-O-methyl cytidine phosphorothioate
  modified_base 48: mod_base = OTHER; note = 2'-O-methyl guanosine
  misc_feature 1..6: note = RNA
  misc_feature 7: note = DNA
  misc_feature 8..25: note = RNA
  misc_feature 26: note = DNA
  misc_feature 27..32: note = RNA
  misc_feature 33: note = DNA
  misc_feature 34..35: note = RNA
  misc_feature 36: note = DNA
  misc_feature 37..48: note = RNA

SEQ ID NO: 399 - DNA, 48 bp, synthetic construct; identical to SEQ ID NO: 317
  source 1..48: mol_type = other DNA
  modified_base 1: mod_base = OTHER; note = 2'-O-methyl cytidine phosphorothioate
  modified_base 2: mod_base = OTHER; note = 2'-O-methyl uridine phosphorothioate
  modified_base 3: mod_base = OTHER; note = 2'-O-methyl guanosine phosphorothioate
  modified_base 4: mod_base = OTHER; note = 2'-O-methyl adenosine
  modified_base 5: mod_base = OTHER; note = 2'-O-methyl adenosine
  modified_base 6: mod_base = OTHER; note = 2'-O-methyl cytidine
  modified_base 7: mod_base = OTHER; note = Deoxythymidine phosphorothioate
  modified_base 8: mod_base = OTHER; note = 2'-O-methyl uridine
  modified_base 9: mod_base = OTHER; note = 2'-O-methyl guanosine
  modified_base 10: mod_base = OTHER; note = 2'-O-methyl uridine
  modified_base 11: mod_base = OTHER; note = 2'-O-methyl guanosine
  modified_base 12: mod_base = OTHER; note = 2'-fluoro guanosine
  modified_base 13: mod_base = OTHER; note = 2'-O-methyl cytidine
  modified_base 14: mod_base = OTHER; note = 2'-fluoro cytidine
  modified_base 15: mod_base = OTHER; note = 2'-O-methyl guanosine
  modified_base 16: mod_base = OTHER; note = 2'-fluoro uridine
  modified_base 17: mod_base = OTHER; note = 2'-O-methyl uridine
  modified_base 18: mod_base = OTHER; note = 2'-O-methyl uridine
  modified_base 19: mod_base = OTHER; note = 2'-O-methyl adenosine
  modified_base 20: mod_base = OTHER; note = 2'-O-methyl cytidine
  modified_base 21: mod_base = OTHER; note = 2'-fluoro guanosine
  modified_base 22: mod_base = OTHER; note = 2'-O-methyl uridine
  modified_base 23: mod_base = OTHER; note = 2'-O-methyl cytidine
  modified_base 24: mod_base = OTHER; note = 2'-O-methyl guanosine
  modified_base 25: mod_base = OTHER; note = 2'-O-methyl guanosine
  modified_base 26: mod_base = OTHER; note = Deoxythymidine phosphorothioate
  modified_base 28: mod_base = OTHER; note = 2'-O-methyl guanosine
  modified_base 29: mod_base = OTHER; note = 2'-O-methyl uridine
  modified_base 30: mod_base = OTHER; note = 2'-O-methyl adenosine
  modified_base 31: mod_base = OTHER; note = 2'-O-methyl guanosine
  modified_base 32: mod_base = OTHER; note = 2'-O-methyl cytidine
  modified_base 33: mod_base = OTHER; note = Deoxythymidine phosphorothioate
  modified_base 35: mod_base = OTHER; note = Deoxycytidine phosphorothioate
  modified_base 38: mod_base = OTHER; note = 2'-O-methyl uridine
  modified_base 39: mod_base = OTHER; note = 2'-O-methyl uridine
  modified_base 40: mod_base = OTHER; note = 2'-O-methyl cytidine
  modified_base 41: mod_base = OTHER; note = 2'-O-methyl uridine
  modified_base 42: mod_base = OTHER; note = 2'-O-methyl cytidine
  modified_base 43: mod_base = OTHER; note = 2'-O-methyl adenosine
  modified_base 44: mod_base = OTHER; note = 2'-O-methyl uridine
  modified_base 45: mod_base = OTHER; note = 2'-O-methyl uridine phosphorothioate
  modified_base 46: mod_base = OTHER; note = 2'-O-methyl uridine phosphorothioate
  modified_base 47: mod_base = OTHER; note = 2'-O-methyl cytidine phosphorothioate
  modified_base 48: mod_base = OTHER; note = 2'-O-methyl guanosine
  misc_feature 1..6: note = RNA
  misc_feature 7: note = DNA
  misc_feature 8..25: note = RNA
  misc_feature 26: note = DNA
  misc_feature 27..32: note = RNA
  misc_feature 33: note = DNA
  misc_feature 34: note = RNA
  misc_feature 35: note = DNA
  misc_feature 36..48: note = RNA

SEQ ID NO: 400 - DNA, 48 bp, synthetic construct; identical to SEQ ID NO: 317
  source 1..48: mol_type = other DNA
  modified_base 1: mod_base = OTHER; note = 2'-O-methyl cytidine phosphorothioate
  modified_base 2: mod_base = OTHER; note = 2'-O-methyl uridine phosphorothioate
  modified_base 3: mod_base = OTHER; note = 2'-O-methyl guanosine phosphorothioate
  modified_base 4: mod_base = OTHER; note = 2'-O-methyl adenosine
  modified_base 5: mod_base = OTHER; note = 2'-O-methyl adenosine
  modified_base 6: mod_base = OTHER; note = 2'-O-methyl cytidine
  modified_base 7: mod_base = OTHER; note = Deoxythymidine phosphorothioate
  modified_base 8: mod_base = OTHER; note = 2'-O-methyl uridine
  modified_base 9: mod_base = OTHER; note = 2'-O-methyl guanosine
  modified_base 10: mod_base = OTHER; note = 2'-O-methyl uridine
  modified_base 11: mod_base = OTHER; note = 2'-O-methyl guanosine
  modified_base 12: mod_base = OTHER; note = 2'-fluoro guanosine
  modified_base 13: mod_base = OTHER; note = 2'-O-methyl cytidine
  modified_base 14: mod_base = OTHER; note = 2'-fluoro cytidine
  modified_base 15: mod_base = OTHER; note = 2'-O-methyl guanosine
  modified_base 16: mod_base = OTHER; note = 2'-fluoro uridine
  modified_base 17: mod_base = OTHER; note = 2'-O-methyl uridine
  modified_base 18: mod_base = OTHER; note = 2'-O-methyl uridine
  modified_base 19: mod_base = OTHER; note = 2'-O-methyl adenosine
  modified_base 20: mod_base = OTHER; note = 2'-O-methyl cytidine
  modified_base 21: mod_base = OTHER; note = 2'-fluoro guanosine
  modified_base 22: mod_base = OTHER; note = 2'-O-methyl uridine
  modified_base 23: mod_base = OTHER; note = 2'-O-methyl cytidine
  modified_base 24: mod_base = OTHER; note = 2'-O-methyl guanosine
  modified_base 25: mod_base = OTHER; note = 2'-O-methyl guanosine
  modified_base 26: mod_base = OTHER; note = Deoxythymidine phosphorothioate
  modified_base 28: mod_base = OTHER; note = 2'-O-methyl guanosine
  modified_base 29: mod_base = OTHER; note = 2'-O-methyl uridine
  modified_base 30: mod_base = OTHER; note = 2'-O-methyl adenosine
  modified_base 31: mod_base = OTHER; note = 2'-O-methyl guanosine
  modified_base 32: mod_base = OTHER; note = 2'-O-methyl cytidine
  modified_base 33: mod_base = OTHER; note = Deoxythymidine phosphorothioate
  modified_base 37: mod_base = OTHER; note = Deoxythymidine phosphorothioate
  modified_base 38: mod_base = OTHER; note = 2'-O-methyl uridine
  modified_base 39: mod_base = OTHER; note = 2'-O-methyl uridine
  modified_base 40: mod_base = OTHER; note = 2'-O-methyl cytidine
  modified_base 41: mod_base = OTHER; note = 2'-O-methyl uridine
  modified_base 42: mod_base = OTHER; note = 2'-O-methyl cytidine
  modified_base 43: mod_base = OTHER; note = 2'-O-methyl adenosine
  modified_base 44: mod_base = OTHER; note = 2'-O-methyl uridine
  modified_base 45: mod_base = OTHER; note = 2'-O-methyl uridine phosphorothioate
  modified_base 46: mod_base = OTHER; note = 2'-O-methyl uridine phosphorothioate
  modified_base 47: mod_base = OTHER; note = 2'-O-methyl cytidine phosphorothioate
  modified_base 48: mod_base = OTHER; note = 2'-O-methyl guanosine
  misc_feature 1..6: note = RNA
  misc_feature 7: note = DNA
  misc_feature 8..25: note = RNA
  misc_feature 26: note = DNA
  misc_feature 27..32: note = RNA
  misc_feature 33: note = DNA
  misc_feature 34..36: note = RNA
  misc_feature 37: note = DNA
  misc_feature 38..48: note = RNA

SEQ ID NO: 401 - DNA, 48 bp, synthetic construct; identical to SEQ ID NO: 317
  source 1..48: mol_type = other DNA
  modified_base 1: mod_base = OTHER; note = 2'-O-methyl cytidine phosphorothioate
  modified_base 2: mod_base = OTHER; note = 2'-O-methyl uridine phosphorothioate
  modified_base 3: mod_base = OTHER; note = 2'-O-methyl guanosine phosphorothioate
  modified_base 4: mod_base = OTHER; note = 2'-O-methyl adenosine
  modified_base 5: mod_base = OTHER; note = 2'-O-methyl adenosine
  modified_base 6: mod_base = OTHER; note = 2'-O-methyl cytidine
  modified_base 7: mod_base = OTHER; note = Deoxythymidine phosphorothioate
  modified_base 8: mod_base = OTHER; note = 2'-O-methyl uridine
  modified_base 9: mod_base = OTHER; note = 2'-O-methyl guanosine
  modified_base 10: mod_base = OTHER; note = 2'-O-methyl uridine
  modified_base 11: mod_base = OTHER; note = 2'-O-methyl guanosine
  modified_base 12: mod_base = OTHER; note = 2'-fluoro guanosine
  modified_base 13: mod_base = OTHER; note = 2'-O-methyl cytidine
  modified_base 14: mod_base = OTHER; note = 2'-fluoro cytidine
  modified_base 15: mod_base = OTHER; note = 2'-O-methyl guanosine
  modified_base 16: mod_base = OTHER; note = 2'-fluoro uridine
  modified_base 17: mod_base = OTHER; note = 2'-O-methyl uridine
  modified_base 18: mod_base = OTHER; note = 2'-O-methyl uridine
  modified_base 19: mod_base = OTHER; note = 2'-O-methyl adenosine
  modified_base 20: mod_base = OTHER; note = 2'-O-methyl cytidine
  modified_base 21: mod_base = OTHER; note = 2'-fluoro guanosine
  modified_base 22: mod_base = OTHER; note = 2'-O-methyl uridine
  modified_base 23: mod_base = OTHER; note = 2'-O-methyl cytidine
  modified_base 24: mod_base = OTHER; note = 2'-O-methyl guanosine
  modified_base 25: mod_base = OTHER; note = 2'-O-methyl guanosine
  modified_base 26: mod_base = OTHER; note = Deoxythymidine phosphorothioate
  modified_base 28: mod_base = OTHER; note = 2'-O-methyl guanosine
  modified_base 29: mod_base = OTHER; note = 2'-O-methyl uridine
  modified_base 30: mod_base = OTHER; note = 2'-O-methyl adenosine
  modified_base 31: mod_base = OTHER; note = 2'-O-methyl guanosine
  modified_base 32: mod_base = OTHER; note = 2'-O-methyl cytidine
  modified_base 33: mod_base = OTHER; note = Deoxythymidine phosphorothioate
  modified_base 35: mod_base = OTHER; note = 2'-O-methyl cytidine
  modified_base 38: mod_base = OTHER; note = 2'-O-methyl uridine
  modified_base 39: mod_base = OTHER; note = 2'-O-methyl uridine
  modified_base 40: mod_base = OTHER; note = 2'-O-methyl cytidine
  modified_base 41: mod_base = OTHER; note = 2'-O-methyl uridine
  modified_base 42: mod_base = OTHER; note = 2'-O-methyl cytidine
  modified_base 43: mod_base = OTHER; note = 2'-O-methyl adenosine
  modified_base 44: mod_base = OTHER; note = 2'-O-methyl uridine
  modified_base 45: mod_base = OTHER; note = 2'-O-methyl uridine phosphorothioate
  modified_base 46: mod_base = OTHER; note = 2'-O-methyl uridine phosphorothioate
  modified_base 47: mod_base = OTHER; note = 2'-O-methyl cytidine phosphorothioate
  modified_base 48: mod_base = OTHER; note = 2'-O-methyl guanosine
  misc_feature 1..6: note = RNA
  misc_feature 7: note = DNA
  misc_feature 8..25: note = RNA
  misc_feature 26: note = DNA
  misc_feature 27..32: note = RNA
  misc_feature 33: note = DNA
  misc_feature 34..48: note = RNA

SEQ ID NO: 402 - DNA, 48 bp, synthetic construct; identical to SEQ ID NO: 317
  source 1..48: mol_type = other DNA
  modified_base 1: mod_base = OTHER; note = 2'-O-methyl cytidine phosphorothioate
  modified_base 2: mod_base = OTHER; note = 2'-O-methyl uridine phosphorothioate
  modified_base 3: mod_base = OTHER; note = 2'-O-methyl guanosine phosphorothioate
  modified_base 4: mod_base = OTHER; note = 2'-O-methyl adenosine
  modified_base 5: mod_base = OTHER; note = 2'-O-methyl adenosine
  modified_base 6: mod_base = OTHER; note = 2'-O-methyl cytidine
  modified_base 7: mod_base = OTHER; note = Deoxythymidine phosphorothioate
  modified_base 8: mod_base = OTHER; note = 2'-O-methyl uridine
  modified_base 9: mod_base = OTHER; note = 2'-O-methyl guanosine
  modified_base 10: mod_base = OTHER; note = 2'-O-methyl uridine
  modified_base 11: mod_base = OTHER; note = 2'-O-methyl guanosine
  modified_base 12: mod_base = OTHER; note = 2'-fluoro guanosine
  modified_base 13: mod_base = OTHER; note = 2'-O-methyl cytidine
  modified_base 14: mod_base = OTHER; note = 2'-fluoro cytidine
  modified_base 15: mod_base = OTHER; note = 2'-O-methyl guanosine
  modified_base 16: mod_base = OTHER; note = 2'-fluoro uridine
  modified_base 17: mod_base = OTHER; note = 2'-O-methyl uridine
  modified_base 18: mod_base = OTHER; note = 2'-O-methyl uridine
  modified_base 19: mod_base = OTHER; note = 2'-O-methyl adenosine
  modified_base 20: mod_base = OTHER; note = 2'-O-methyl cytidine
  modified_base 21: mod_base = OTHER; note = 2'-fluoro guanosine
  modified_base 22: mod_base = OTHER; note = 2'-O-methyl uridine
  modified_base 23: mod_base = OTHER; note = 2'-O-methyl cytidine
  modified_base 24: mod_base = OTHER; note = 2'-O-methyl guanosine
  modified_base 25: mod_base = OTHER; note = 2'-O-methyl guanosine
  modified_base 26: mod_base = OTHER; note = Deoxythymidine phosphorothioate
  modified_base 28: mod_base = OTHER; note = 2'-O-methyl guanosine
  modified_base 29: mod_base = OTHER; note = 2'-O-methyl uridine
  modified_base 30: mod_base = OTHER; note = 2'-O-methyl adenosine
  modified_base 31: mod_base = OTHER; note = 2'-O-methyl guanosine
  modified_base 32: mod_base = OTHER; note = 2'-O-methyl cytidine
  modified_base 33: mod_base = OTHER; note = Deoxythymidine phosphorothioate
  modified_base 35: mod_base = OTHER; note = Deoxycytidine phosphorothioate
  modified_base 36: mod_base = OTHER; note = Deoxycytidine phosphorothioate
  modified_base 38: mod_base = OTHER; note = 2'-O-methyl uridine
  modified_base 39: mod_base = OTHER; note = 2'-O-methyl uridine
  modified_base 40: mod_base = OTHER; note = 2'-O-methyl cytidine
  modified_base 41: mod_base = OTHER; note = 2'-O-methyl uridine
  modified_base 42: mod_base = OTHER; note = 2'-O-methyl cytidine
  modified_base 43: mod_base = OTHER; note = 2'-O-methyl adenosine
  modified_base 44: mod_base = OTHER; note = 2'-O-methyl uridine
  modified_base 45: mod_base = OTHER; note = 2'-O-methyl uridine phosphorothioate
  modified_base 46: mod_base = OTHER; note = 2'-O-methyl uridine phosphorothioate
  modified_base 47: mod_base = OTHER; note = 2'-O-methyl cytidine phosphorothioate
  modified_base 48: mod_base = OTHER; note = 2'-O-methyl guanosine
  misc_feature 1..6: note = RNA
  misc_feature 7: note = DNA
  misc_feature 8..25: note = RNA
  misc_feature 26: note = DNA
  misc_feature 27..32: note = RNA
  misc_feature 33: note = DNA
  misc_feature 34: note = RNA
  misc_feature 35..36: note = DNA
  misc_feature 37..48: note = RNA

SEQ ID NO: 403 - DNA, 48 bp, synthetic construct; identical to SEQ ID NO: 317
  source 1..48: mol_type = other DNA
  modified_base 1: mod_base = OTHER; note = 2'-O-methyl cytidine phosphorothioate
  modified_base 2: mod_base = OTHER; note = 2'-O-methyl uridine phosphorothioate
  modified_base 3: mod_base = OTHER; note = 2'-O-methyl guanosine phosphorothioate
  modified_base 4: mod_base = OTHER; note = 2'-O-methyl adenosine
  modified_base 5: mod_base = OTHER; note = 2'-O-methyl adenosine
  modified_base 6: mod_base = OTHER; note = 2'-O-methyl cytidine
  modified_base 7: mod_base = OTHER; note = Deoxythymidine phosphorothioate
  modified_base 8: mod_base = OTHER; note = 2'-O-methyl uridine
  modified_base 9: mod_base = OTHER; note = 2'-O-methyl guanosine
  modified_base 10: mod_base = OTHER; note = 2'-O-methyl uridine
  modified_base 11: mod_base = OTHER; note = 2'-O-methyl guanosine
  modified_base 12: mod_base = OTHER; note = 2'-fluoro guanosine
  modified_base 13: mod_base = OTHER; note = 2'-O-methyl cytidine
  modified_base 14: mod_base = OTHER; note = 2'-fluoro cytidine
  modified_base 15: mod_base = OTHER; note = 2'-O-methyl guanosine
  modified_base 16: mod_base = OTHER; note = 2'-fluoro uridine
  modified_base 17: mod_base = OTHER; note = 2'-O-methyl uridine
  modified_base 18: mod_base = OTHER; note = 2'-O-methyl uridine
  modified_base 19: mod_base = OTHER; note = 2'-O-methyl adenosine
  modified_base 20: mod_base = OTHER; note = 2'-O-methyl cytidine
  modified_base 21: mod_base = OTHER; note = 2'-fluoro guanosine
  modified_base 22: mod_base = OTHER; note = 2'-O-methyl uridine
  modified_base 23: mod_base = OTHER; note = 2'-O-methyl cytidine
  modified_base 24: mod_base = OTHER; note = 2'-O-methyl guanosine
  modified_base 25: mod_base = OTHER; note = 2'-O-methyl guanosine
  modified_base 26: mod_base = OTHER; note = Deoxythymidine phosphorothioate
  modified_base 28: mod_base = OTHER; note = 2'-O-methyl guanosine
  modified_base 29: mod_base = OTHER; note = 2'-O-methyl uridine
  modified_base 30: mod_base = OTHER; note = 2'-O-methyl adenosine
  modified_base 31: mod_base = OTHER; note = 2'-O-methyl guanosine
  modified_base 32: mod_base = OTHER; note = 2'-O-methyl cytidine
  modified_base 33: mod_base = OTHER; note = Deoxythymidine phosphorothioate
  modified_base 35: mod_base = OTHER; note = Deoxycytidine phosphorothioate
  modified_base 37: mod_base = OTHER; note = Deoxythymidine phosphorothioate
  modified_base 38: mod_base = OTHER; note = 2'-O-methyl uridine
  modified_base 39: mod_base = OTHER; note = 2'-O-methyl uridine
  modified_base 40: mod_base = OTHER; note = 2'-O-methyl cytidine
  modified_base 41: mod_base = OTHER; note = 2'-O-methyl uridine
  modified_base 42: mod_base = OTHER; note = 2'-O-methyl cytidine
  modified_base 43: mod_base = OTHER; note = 2'-O-methyl adenosine
  modified_base 44: mod_base = OTHER; note = 2'-O-methyl uridine
  modified_base 45: mod_base = OTHER; note = 2'-O-methyl uridine phosphorothioate
  modified_base 46: mod_base = OTHER; note = 2'-O-methyl uridine phosphorothioate
  modified_base 47: mod_base = OTHER; note = 2'-O-methyl cytidine phosphorothioate
  modified_base 48: mod_base = OTHER; note = 2'-O-methyl guanosine
  misc_feature 1..6: note = RNA
  misc_feature 7: note = DNA
  misc_feature 8..25: note = RNA
  misc_feature 26: note = DNA
  misc_feature 27..32: note = RNA
  misc_feature 33: note = DNA
  misc_feature 34: note = RNA
  misc_feature 35: note = DNA
  misc_feature 36: note = RNA
  misc_feature 37: note = DNA
  misc_feature 38..48: note = RNA

SEQ ID NO: 404 - DNA, 48 bp, synthetic construct; identical to SEQ ID NO: 317
  source 1..48: mol_type = other DNA
  modified_base 1: mod_base = OTHER; note = 2'-O-methyl cytidine phosphorothioate
  modified_base 2: mod_base = OTHER; note = 2'-O-methyl uridine phosphorothioate
  modified_base 3: mod_base = OTHER; note = 2'-O-methyl guanosine phosphorothioate
  modified_base 4: mod_base = OTHER; note = 2'-O-methyl adenosine
  modified_base 5: mod_base = OTHER; note = 2'-O-methyl adenosine
  modified_base 6: mod_base = OTHER; note = 2'-O-methyl cytidine
  modified_base 7: mod_base = OTHER; note = Deoxythymidine phosphorothioate
  modified_base 8: mod_base = OTHER; note = 2'-O-methyl uridine
  modified_base 9: mod_base = OTHER; note = 2'-O-methyl guanosine
  modified_base 10: mod_base = OTHER; note = 2'-O-methyl uridine
  modified_base 11: mod_base = OTHER; note = 2'-O-methyl guanosine
  modified_base 12: mod_base = OTHER; note = 2'-fluoro guanosine
  modified_base 13: mod_base = OTHER; note = 2'-O-methyl cytidine
  modified_base 14: mod_base = OTHER; note = 2'-fluoro cytidine
  modified_base 15: mod_base = OTHER; note = 2'-O-methyl guanosine
  modified_base 16: mod_base = OTHER; note = 2'-fluoro uridine
  modified_base 17: mod_base = OTHER; note = 2'-O-methyl uridine
  modified_base 18: mod_base = OTHER; note = 2'-O-methyl uridine
  modified_base 19: mod_base = OTHER; note = 2'-O-methyl adenosine
  modified_base 20: mod_base = OTHER; note = 2'-O-methyl cytidine
  modified_base 21: mod_base = OTHER; note = 2'-fluoro guanosine
  modified_base 22: mod_base = OTHER; note = 2'-O-methyl uridine
  modified_base 23: mod_base = OTHER; note = 2'-O-methyl cytidine
  modified_base 24: mod_base = OTHER; note = 2'-O-methyl guanosine
  modified_base 25: mod_base = OTHER; note = 2'-O-methyl guanosine
  modified_base 26: mod_base = OTHER; note = Deoxythymidine phosphorothioate
  modified_base 28: mod_base = OTHER; note = 2'-O-methyl guanosine
  modified_base 29: mod_base = OTHER; note = 2'-O-methyl uridine
  modified_base 30: mod_base = OTHER; note = 2'-O-methyl adenosine
  modified_base 31: mod_base = OTHER; note = 2'-O-methyl guanosine
  modified_base 32: mod_base = OTHER; note = 2'-O-methyl cytidine
  modified_base 33: mod_base = OTHER; note = Deoxythymidine phosphorothioate
  modified_base 35: mod_base = OTHER; note = Deoxycytidine phosphorothioate
  modified_base 36: mod_base = OTHER; note = Deoxycytidine phosphorothioate
  modified_base 37: mod_base = OTHER; note = Deoxythymidine phosphorothioate
  modified_base 38: mod_base = OTHER; note = 2'-O-methyl uridine
  modified_base 39: mod_base = OTHER; note = 2'-O-methyl uridine
  modified_base 40: mod_base = OTHER; note = 2'-O-methyl cytidine
  modified_base 41: mod_base = OTHER; note = 2'-O-methyl uridine
  modified_base 42: mod_base = OTHER; note = 2'-O-methyl cytidine
  modified_base 43: mod_base = OTHER; note = 2'-O-methyl adenosine
  modified_base 44: mod_base = OTHER; note = 2'-O-methyl uridine
  modified_base 45: mod_base = OTHER; note = 2'-O-methyl uridine phosphorothioate
  modified_base 46: mod_base = OTHER; note = 2'-O-methyl uridine phosphorothioate
  modified_base 47: mod_base = OTHER; note = 2'-O-methyl cytidine phosphorothioate
  modified_base 48: mod_base = OTHER; note = 2'-O-methyl guanosine
  misc_feature 1..6: note = RNA
  misc_feature 7: note = DNA
  misc_feature 8..25: note = RNA
  misc_feature 26: note = DNA
  misc_feature 27..32: note = RNA
  misc_feature 33: note = DNA
  misc_feature 34: note = RNA
  misc_feature 35..37: note = DNA
  misc_feature 38..48: note = RNA

SEQ ID NO: 405 - DNA, 48 bp, synthetic construct; identical to SEQ ID NO: 317
  source 1..48: mol_type = other DNA
  modified_base 1: mod_base = OTHER; note = 2'-O-methyl cytidine phosphorothioate
  modified_base 2: mod_base = OTHER; note = 2'-O-methyl uridine phosphorothioate
  modified_base 3: mod_base = OTHER; note = 2'-O-methyl guanosine phosphorothioate
  modified_base 4: mod_base = OTHER; note = 2'-O-methyl adenosine
  modified_base 5: mod_base = OTHER; note = 2'-O-methyl adenosine
  modified_base 6: mod_base = OTHER; note = 2'-O-methyl cytidine
  modified_base 7: mod_base = OTHER; note = Deoxythymidine phosphorothioate
  modified_base 8: mod_base = OTHER; note = 2'-O-methyl uridine
  modified_base 9: mod_base = OTHER; note = 2'-O-methyl guanosine
  modified_base 10: mod_base = OTHER; note = 2'-O-methyl uridine
  modified_base 11: mod_base = OTHER; note = 2'-O-methyl guanosine
  modified_base 12: mod_base = OTHER; note = 2'-fluoro guanosine
  modified_base 13: mod_base = OTHER; note = 2'-O-methyl cytidine
  modified_base 14: mod_base = OTHER; note = 2'-fluoro cytidine
  modified_base 15: mod_base = OTHER; note = 2'-O-methyl guanosine
  modified_base 16: mod_base = OTHER; note = 2'-fluoro uridine
  modified_base 17: mod_base = OTHER; note = 2'-O-methyl uridine
  modified_base 18: mod_base = OTHER; note = 2'-O-methyl uridine
  modified_base 19: mod_base = OTHER; note = 2'-O-methyl adenosine
  modified_base 20: mod_base = OTHER; note = 2'-O-methyl cytidine
  modified_base 21: mod_base = OTHER; note = 2'-fluoro guanosine
  modified_base 22: mod_base = OTHER; note = 2'-O-methyl uridine
  modified_base 23: mod_base = OTHER; note = 2'-O-methyl cytidine
  modified_base 24: mod_base = OTHER; note = 2'-O-methyl guanosine
  modified_base 25: mod_base = OTHER; note = 2'-O-methyl guanosine
  modified_base 26: mod_base = OTHER; note = Deoxythymidine phosphorothioate
  modified_base 28: mod_base = OTHER; note = 2'-O-methyl guanosine
  modified_base 29: mod_base = OTHER; note = 2'-O-methyl uridine
  modified_base 30: mod_base = OTHER; note = 2'-O-methyl adenosine
  modified_base 31: mod_base = OTHER; note = 2'-O-methyl guanosine
  modified_base 32: mod_base = OTHER; note = 2'-O-methyl cytidine
  modified_base 33: mod_base = OTHER; note = Deoxythymidine phosphorothioate
  modified_base 35: mod_base = OTHER; note = 2'-O-methyl cytidine
  modified_base 36: mod_base = OTHER; note = Deoxycytidine phosphorothioate
  modified_base 38: mod_base = OTHER; note = 2'-O-methyl uridine
  modified_base 39: mod_base = OTHER; note = 2'-O-methyl uridine
  modified_base 40: mod_base = OTHER; note = 2'-O-methyl cytidine
  modified_base 41: mod_base = OTHER; note = 2'-O-methyl uridine
  modified_base 42: mod_base = OTHER; note = 2'-O-methyl cytidine
  modified_base 43: mod_base = OTHER; note = 2'-O-methyl adenosine
  modified_base 44: mod_base = OTHER; note = 2'-O-methyl uridine
  modified_base 45: mod_base = OTHER; note = 2'-O-methyl uridine phosphorothioate
  modified_base 46: mod_base = OTHER; note = 2'-O-methyl uridine phosphorothioate
  modified_base 47: mod_base = OTHER; note = 2'-O-methyl cytidine phosphorothioate
  modified_base 48: mod_base = OTHER; note = 2'-O-methyl guanosine
  misc_feature 1..6: note = RNA
  misc_feature 7: note = DNA
  misc_feature 8..25: note = RNA
  misc_feature 26: note = DNA
  misc_feature 27..32: note = RNA
  misc_feature 33: note = DNA
  misc_feature 34..35: note = RNA
  misc_feature 36: note = DNA
  misc_feature 37..48: note = RNA

SEQ ID NO: 406 - DNA, 48 bp, synthetic construct; identical to SEQ ID NO: 317
  source 1..48: mol_type = other DNA
  modified_base 1: mod_base = OTHER; note = 2'-O-methyl cytidine phosphorothioate
  modified_base 2: mod_base = OTHER; note = 2'-O-methyl uridine phosphorothioate
  modified_base 3: mod_base = OTHER; note = 2'-O-methyl guanosine phosphorothioate
  modified_base 4: mod_base = OTHER; note = 2'-O-methyl adenosine
  modified_base 5: mod_base = OTHER; note = 2'-O-methyl adenosine
  modified_base 6: mod_base = OTHER; note = 2'-O-methyl cytidine
  modified_base 7: mod_base = OTHER; note = Deoxythymidine phosphorothioate
  modified_base 8: mod_base = OTHER; note = 2'-O-methyl uridine
  modified_base 9: mod_base = OTHER; note = 2'-O-methyl guanosine
  modified_base 10: mod_base = OTHER; note = 2'-O-methyl uridine
  modified_base 11: mod_base = OTHER; note = 2'-O-methyl guanosine
  modified_base 12: mod_base = OTHER; note = 2'-fluoro guanosine
  modified_base 13: mod_base = OTHER; note = 2'-O-methyl cytidine
  modified_base 14: mod_base = OTHER; note = 2'-fluoro cytidine
  modified_base 15: mod_base = OTHER; note = 2'-O-methyl guanosine
  modified_base 16: mod_base = OTHER; note = 2'-fluoro uridine
  modified_base 17: mod_base = OTHER; note = 2'-O-methyl uridine
  modified_base 18: mod_base = OTHER; note = 2'-O-methyl uridine
  modified_base 19: mod_base = OTHER; note = 2'-O-methyl adenosine
  modified_base 20: mod_base = OTHER; note = 2'-O-methyl cytidine
  modified_base 21: mod_base = OTHER; note = 2'-fluoro guanosine
  modified_base 22: mod_base = OTHER; note = 2'-O-methyl uridine
  modified_base 23: mod_base = OTHER; note = 2'-O-methyl cytidine
  modified_base 24: mod_base = OTHER; note = 2'-O-methyl guanosine
  modified_base 25: mod_base = OTHER; note = 2'-O-methyl guanosine
  modified_base 26: mod_base = OTHER; note = Deoxythymidine phosphorothioate
  modified_base 28: mod_base = OTHER; note = 2'-O-methyl guanosine
  modified_base 29: mod_base = OTHER; note = 2'-O-methyl uridine
  modified_base 30: mod_base = OTHER; note = 2'-O-methyl adenosine
  modified_base 31: mod_base = OTHER; note = 2'-O-methyl guanosine
  modified_base 32: mod_base = OTHER; note = 2'-O-methyl cytidine
  modified_base 33: mod_base = OTHER; note = Deoxythymidine phosphorothioate
  modified_base 35: mod_base = OTHER; note = 2'-O-methyl cytidine
  modified_base 37: mod_base = OTHER; note = Deoxythymidine phosphorothioate
  modified_base 38: mod_base = OTHER; note = 2'-O-methyl uridine
  modified_base 39: mod_base = OTHER; note = 2'-O-methyl uridine
  modified_base 40: mod_base = OTHER; note = 2'-O-methyl cytidine
  modified_base 41: mod_base = OTHER; note = 2'-O-methyl uridine
  modified_base 42: mod_base = OTHER; note = 2'-O-methyl cytidine
  modified_base 43: mod_base = OTHER; note = 2'-O-methyl adenosine
  modified_base 44: mod_base = OTHER; note = 2'-O-methyl uridine
  modified_base 45: mod_base = OTHER; note = 2'-O-methyl uridine phosphorothioate
  modified_base 46: mod_base = OTHER; note = 2'-O-methyl uridine phosphorothioate
  modified_base 47: mod_base = OTHER; note = 2'-O-methyl cytidine phosphorothioate
  modified_base 48: mod_base = OTHER; note = 2'-O-methyl guanosine
  misc_feature 1..6: note = RNA
  misc_feature 7: note = DNA
  misc_feature 8..25: note = RNA
  misc_feature 26: note = DNA
  misc_feature 27..32: note = RNA
  misc_feature 33: note = DNA
  misc_feature 34..36: note = RNA
  misc_feature 37: note = DNA
  misc_feature 38..48: note = RNA

SEQ ID NO: 407 - DNA, 48 bp, synthetic construct; identical to SEQ ID NO: 317
  source 1..48: mol_type = other DNA
  modified_base 1: mod_base = OTHER; note = 2'-O-methyl cytidine phosphorothioate
  modified_base 2: mod_base = OTHER; note = 2'-O-methyl uridine phosphorothioate
  modified_base 3: mod_base = OTHER; note = 2'-O-methyl guanosine phosphorothioate
  modified_base 4: mod_base = OTHER; note = 2'-O-methyl adenosine
  modified_base 5: mod_base = OTHER; note = 2'-O-methyl adenosine
  modified_base 6: mod_base = OTHER; note = 2'-O-methyl cytidine
  modified_base 7: mod_base = OTHER; note = Deoxythymidine phosphorothioate
  modified_base 8: mod_base = OTHER; note = 2'-O-methyl uridine
  modified_base 9: mod_base = OTHER; note = 2'-O-methyl guanosine
  modified_base 10: mod_base = OTHER; note = 2'-O-methyl uridine
  modified_base 11: mod_base = OTHER; note = 2'-O-methyl guanosine
  modified_base 12: mod_base = OTHER; note = 2'-fluoro guanosine
  modified_base 13: mod_base = OTHER; note = 2'-O-methyl cytidine
  modified_base 14: mod_base = OTHER; note = 2'-fluoro cytidine
  modified_base 15: mod_base = OTHER; note = 2'-O-methyl guanosine
  modified_base 16: mod_base = OTHER; note = 2'-fluoro uridine
  modified_base 17: mod_base = OTHER; note = 2'-O-methyl uridine
  modified_base 18: mod_base = OTHER; note = 2'-O-methyl uridine
  modified_base 19: mod_base = OTHER; note = 2'-O-methyl adenosine
  modified_base 20: mod_base = OTHER; note = 2'-O-methyl cytidine
  modified_base 21: mod_base = OTHER; note = 2'-fluoro guanosine
  modified_base 22: mod_base = OTHER; note = 2'-O-methyl uridine
  modified_base 23: mod_base = OTHER; note = 2'-O-methyl cytidine
  modified_base 24: mod_base = OTHER; note = 2'-O-methyl guanosine
  modified_base 25: mod_base = OTHER; note = 2'-O-methyl guanosine
  modified_base 26: mod_base = OTHER; note = Deoxythymidine phosphorothioate
  modified_base 28: mod_base = OTHER; note = 2'-O-methyl guanosine
  modified_base 29: mod_base = OTHER; note = 2'-O-methyl uridine
  modified_base 30: mod_base = OTHER; note = 2'-O-methyl adenosine
  modified_base 31: mod_base = OTHER; note = 2'-O-methyl guanosine
  modified_base 32: mod_base = OTHER; note = 2'-O-methyl cytidine
  modified_base 33: mod_base = OTHER; note = Deoxythymidine phosphorothioate
  modified_base 35: mod_base = OTHER; note = 2'-O-methyl cytidine
  modified_base 36: mod_base = OTHER; note = Deoxycytidine phosphorothioate
  modified_base 37: mod_base = OTHER; note = Deoxythymidine phosphorothioate
  modified_base 38: mod_base = OTHER; note = 2'-O-methyl uridine
  modified_base 39: mod_base = OTHER; note = 2'-O-methyl uridine
  modified_base 40: mod_base = OTHER; note = 2'-O-methyl cytidine
  modified_base 41: mod_base = OTHER; note = 2'-O-methyl uridine
  modified_base 42: mod_base = OTHER; note = 2'-O-methyl cytidine
  modified_base 43: mod_base = OTHER; note = 2'-O-methyl adenosine
  modified_base 44: mod_base = OTHER; note = 2'-O-methyl uridine
  modified_base 45: mod_base = OTHER; note = 2'-O-methyl uridine phosphorothioate
  modified_base 46: mod_base = OTHER; note = 2'-O-methyl uridine phosphorothioate
  modified_base 47: mod_base = OTHER; note = 2'-O-methyl cytidine phosphorothioate
  modified_base 48: mod_base = OTHER; note = 2'-O-methyl guanosine
  misc_feature 1..6: note = RNA
  misc_feature 7: note = DNA
  misc_feature 8..25: note = RNA
  misc_feature 26: note = DNA
  misc_feature 27..32: note = RNA
  misc_feature 33: note = DNA
  misc_feature 34..35: note = RNA
  misc_feature 36..37: note = DNA
  misc_feature 38..48: note = RNA

SEQ ID NO: 408 - DNA, 48 bp, synthetic construct; identical to SEQ ID NO: 317
  source 1..48: mol_type = other DNA
  modified_base 1: mod_base = OTHER; note = 2'-O-methyl cytidine phosphorothioate
  modified_base 2: mod_base = OTHER; note = 2'-O-methyl uridine phosphorothioate
  modified_base 3: mod_base = OTHER; note = 2'-O-methyl guanosine phosphorothioate
  modified_base 4: mod_base = OTHER; note = 2'-O-methyl adenosine
  modified_base 5: mod_base = OTHER; note = 2'-O-methyl adenosine
  modified_base 6: mod_base = OTHER; note = 2'-O-methyl cytidine
  modified_base 7: mod_base = OTHER; note = Deoxythymidine phosphorothioate
  modified_base 8: mod_base = OTHER; note = 2'-O-methyl uridine
  modified_base 9: mod_base = OTHER; note = 2'-O-methyl guanosine
  modified_base 10: mod_base = OTHER; note = 2'-O-methyl uridine
  modified_base 11: mod_base = OTHER; note = 2'-O-methyl guanosine
  modified_base 12: mod_base = OTHER; note = 2'-fluoro guanosine
  modified_base 13: mod_base = OTHER; note = 2'-O-methyl cytidine
  modified_base 14: mod_base = OTHER; note = 2'-fluoro cytidine
  modified_base 15: mod_base = OTHER; note = 2'-O-methyl guanosine
  modified_base 16: mod_base = OTHER; note = 2'-fluoro uridine
  modified_base 17: mod_base = OTHER; note = 2'-O-methyl uridine
  modified_base 18: mod_base = OTHER; note = 2'-O-methyl uridine
  modified_base 19: mod_base = OTHER; note = 2'-O-methyl adenosine
  modified_base 20: mod_base = OTHER; note = 2'-O-methyl cytidine
  modified_base 21: mod_base = OTHER; note = 2'-fluoro guanosine
  modified_base 22: mod_base = OTHER; note = 2'-O-methyl uridine
  modified_base 23: mod_base = OTHER; note = 2'-O-methyl cytidine
  modified_base 24: mod_base = OTHER; note = 2'-O-methyl guanosine
  modified_base 25: mod_base = OTHER; note = 2'-O-methyl guanosine
  modified_base 26: mod_base = OTHER; note = Deoxythymidine phosphorothioate
  modified_base 28: mod_base = OTHER; note = 2'-O-methyl guanosine
  modified_base 29: mod_base = OTHER; note = 2'-O-methyl uridine
  modified_base 30: mod_base = OTHER; note = 2'-O-methyl adenosine
  modified_base 31: mod_base = OTHER; note = 2'-O-methyl guanosine
  modified_base 32: mod_base = OTHER; note = 2'-O-methyl cytidine
  modified_base 33: mod_base = OTHER; note = Deoxythymidine phosphorothioate
  modified_base 35: mod_base = OTHER; note = 2'-O-methyl cytidine
  modified_base 36: mod_base = OTHER; note = 2'-O-methyl cytidine
  modified_base 38: mod_base = OTHER; note = 2'-O-methyl uridine
  modified_base 39: mod_base = OTHER; note = 2'-O-methyl uridine
  modified_base 40: mod_base = OTHER; note = 2'-O-methyl cytidine
  modified_base 41: mod_base = OTHER; note = 2'-O-methyl uridine
  modified_base 42: mod_base = OTHER; note = 2'-O-methyl cytidine
  modified_base 43: mod_base = OTHER; note = 2'-O-methyl adenosine
  modified_base 44: mod_base = OTHER; note = 2'-O-methyl uridine
  modified_base 45: mod_base = OTHER; note = 2'-O-methyl uridine phosphorothioate
  modified_base 46: mod_base = OTHER; note = 2'-O-methyl uridine phosphorothioate
  modified_base 47: mod_base = OTHER; note = 2'-O-methyl cytidine phosphorothioate
  modified_base 48: mod_base = OTHER; note = 2'-O-methyl guanosine
  misc_feature 1..6: note = RNA
  misc_feature 7: note = DNA
  misc_feature 8..25: note = RNA
  misc_feature 26: note = DNA
  misc_feature 27..32: note = RNA
  misc_feature 33: note = DNA
  misc_feature 34..48: note = RNA

SEQ ID NO: 409 - DNA, 48 bp, synthetic construct; identical to SEQ ID NO: 317
  source 1..48: mol_type = other DNA
  modified_base 1: mod_base = OTHER; note = 2'-O-methyl cytidine phosphorothioate
  modified_base 2: mod_base = OTHER; note = 2'-O-methyl uridine phosphorothioate
  modified_base 3: mod_base = OTHER; note = 2'-O-methyl guanosine phosphorothioate
  modified_base 4: mod_base = OTHER; note = 2'-O-methyl adenosine
  modified_base 5: mod_base = OTHER; note = 2'-O-methyl adenosine
  modified_base 6: mod_base = OTHER; note = 2'-O-methyl cytidine
  modified_base 7: mod_base = OTHER; note = Deoxythymidine phosphorothioate
  modified_base 8: mod_base = OTHER; note = 2'-O-methyl uridine
  modified_base 9: mod_base = OTHER; note = 2'-O-methyl guanosine
  modified_base 10: mod_base = OTHER; note = 2'-O-methyl uridine
  modified_base 11: mod_base = OTHER; note = 2'-O-methyl guanosine
  modified_base 12: mod_base = OTHER; note = 2'-fluoro guanosine
  modified_base 13: mod_base = OTHER; note = 2'-O-methyl cytidine
  modified_base 14: mod_base = OTHER; note = 2'-fluoro cytidine
  modified_base 15: mod_base = OTHER; note = 2'-O-methyl guanosine
  modified_base 16: mod_base = OTHER; note = 2'-fluoro uridine
  modified_base 17: mod_base = OTHER; note = 2'-O-methyl uridine
  modified_base 18: mod_base = OTHER; note = 2'-O-methyl uridine
  modified_base 19: mod_base = OTHER; note = 2'-O-methyl adenosine
  modified_base 20: mod_base = OTHER; note = 2'-O-methyl cytidine
  modified_base 21: mod_base = OTHER; note = 2'-fluoro guanosine
  modified_base 22: mod_base = OTHER; note = 2'-O-methyl uridine
  modified_base 23: mod_base = OTHER; note = 2'-O-methyl cytidine
  modified_base 24: mod_base = OTHER; note = 2'-O-methyl guanosine
  modified_base 25: mod_base = OTHER; note = 2'-O-methyl guanosine
  modified_base 26: mod_base = OTHER; note = Deoxythymidine phosphorothioate
  modified_base 28: mod_base = OTHER; note = 2'-O-methyl guanosine
  modified_base 29: mod_base = OTHER; note = 2'-O-methyl uridine
  modified_base 30: mod_base = OTHER; note = 2'-O-methyl adenosine
  modified_base 31: mod_base = OTHER; note = 2'-O-methyl guanosine
  modified_base 32: mod_base = OTHER; note = 2'-O-methyl cytidine
  modified_base 33: mod_base = OTHER; note = Deoxythymidine phosphorothioate
  modified_base 35: mod_base = OTHER; note = 2'-O-methyl cytidine
  modified_base 36: mod_base = OTHER; note = 2'-O-methyl cytidine
  modified_base 37: mod_base = OTHER; note = Deoxythymidine phosphorothioate
  modified_base 38: mod_base = OTHER; note = 2'-O-methyl uridine
  modified_base 39: mod_base = OTHER; note = 2'-O-methyl uridine
  modified_base 40: mod_base = OTHER; note = 2'-O-methyl cytidine
  modified_base 41: mod_base = OTHER; note = 2'-O-methyl uridine
  modified_base 42: mod_base = OTHER; note = 2'-O-methyl cytidine
  modified_base 43: mod_base = OTHER; note = 2'-O-methyl adenosine
  modified_base 44: mod_base = OTHER; note = 2'-O-methyl uridine
  modified_base 45: mod_base = OTHER; note = 2'-O-methyl uridine phosphorothioate
  modified_base 46: mod_base = OTHER; note = 2'-O-methyl uridine phosphorothioate
  modified_base 47: mod_base = OTHER; note = 2'-O-methyl cytidine phosphorothioate
  modified_base 48: mod_base = OTHER; note = 2'-O-methyl guanosine
  misc_feature 1..6: note = RNA
  misc_feature 7: note = DNA
  misc_feature 8..25: note = RNA
  misc_feature 26: note = DNA
  misc_feature 27..32: note = RNA
  misc_feature 33: note = DNA
  misc_feature 34..36: note = RNA
  misc_feature 37: note = DNA
  misc_feature 38..48: note = RNA

SEQ ID NO: 410 - DNA, 48 bp, synthetic construct; identical to SEQ ID NO: 317
  source 1..48: mol_type = other DNA
  modified_base 1: mod_base = OTHER; note = 2'-O-methyl cytidine phosphorothioate
  modified_base 2: mod_base = OTHER; note = 2'-O-methyl uridine phosphorothioate
  modified_base 3: mod_base = OTHER; note = 2'-O-methyl guanosine phosphorothioate
  modified_base 4: mod_base = OTHER; note = 2'-O-methyl adenosine
  modified_base 5: mod_base = OTHER; note = 2'-O-methyl adenosine
  modified_base 6: mod_base = OTHER; note = 2'-O-methyl cytidine
  modified_base 7: mod_base = OTHER; note = Deoxythymidine phosphorothioate
  modified_base 8: mod_base = OTHER; note = 2'-O-methyl uridine
  modified_base 9: mod_base = OTHER; note = 2'-O-methyl guanosine
  modified_base 10: mod_base = OTHER; note = 2'-O-methyl uridine
  modified_base 11: mod_base = OTHER; note = 2'-O-methyl guanosine
  modified_base 12: mod_base = OTHER; note = 2'-fluoro guanosine
  modified_base 13: mod_base = OTHER; note = 2'-O-methyl cytidine
  modified_base 14: mod_base = OTHER; note = 2'-fluoro cytidine
  modified_base 15: mod_base = OTHER; note = 2'-O-methyl guanosine
  modified_base 16: mod_base = OTHER; note = 2'-fluoro uridine
  modified_base 17: mod_base = OTHER; note = 2'-O-methyl uridine
  modified_base 18: mod_base = OTHER; note = 2'-O-methyl uridine
  modified_base 19: mod_base = OTHER; note = 2'-fluoro adenosine
  modified_base 20: mod_base = OTHER; note = 2'-O-methyl cytidine
  modified_base 21: mod_base = OTHER; note = 2'-fluoro guanosine
  modified_base 22: mod_base = OTHER; note = 2'-O-methyl uridine
  modified_base 23: mod_base = OTHER; note = 2'-O-methyl cytidine
  modified_base 24: mod_base = OTHER; note = 2'-O-methyl guanosine
  modified_base 25: mod_base = OTHER; note = 2'-O-methyl guanosine
  modified_base 28: mod_base = OTHER; note = 2'-O-methyl guanosine
  modified_base 29: mod_base = OTHER; note = 2'-O-methyl uridine
  modified_base 30: mod_base = OTHER; note = 2'-O-methyl adenosine
  modified_base 31: mod_base = OTHER; note = 2'-O-methyl guanosine
  modified_base 32: mod_base = OTHER; note = 2'-O-methyl cytidine
  modified_base 35: mod_base = OTHER; note = Deoxycytidine phosphorothioate
  modified_base 36: mod_base = OTHER; note = Deoxycytidine phosphorothioate
  modified_base 37: mod_base = OTHER; note = Deoxythymidine phosphorothioate
  modified_base 38: mod_base = OTHER; note = 2'-O-methyl uridine
  modified_base 39: mod_base = OTHER; note = 2'-O-methyl uridine
  modified_base 40: mod_base = OTHER; note = 2'-O-methyl cytidine
  modified_base 41: mod_base = OTHER; note = 2'-O-methyl uridine
  modified_base 42: mod_base = OTHER; note = 2'-O-methyl cytidine
  modified_base 43: mod_base = OTHER; note = 2'-O-methyl adenosine
  modified_base 44: mod_base = OTHER; note = 2'-O-methyl uridine
  modified_base 45: mod_base = OTHER; note = 2'-O-methyl uridine phosphorothioate
  modified_base 46: mod_base = OTHER; note = 2'-O-methyl uridine phosphorothioate
  modified_base 47: mod_base = OTHER; note = 2'-O-methyl cytidine phosphorothioate
  modified_base 48: mod_base = OTHER; note = 2'-O-methyl guanosine
  misc_feature 1..6: note = RNA
  misc_feature 7: note = DNA
  misc_feature 8..34: note = RNA
  misc_feature 35..37: note = DNA
  misc_feature 38..48: note = RNA

SEQ ID NO: 411 - DNA, 48 bp, synthetic construct; identical to SEQ ID NO: 317
  source 1..48: mol_type = other DNA
  modified_base 1: mod_base = OTHER; note = 2'-O-methyl cytidine phosphorothioate
  modified_base 2: mod_base = OTHER; note = 2'-O-methyl uridine phosphorothioate
  modified_base 3: mod_base = OTHER; note = 2'-O-methyl guanosine phosphorothioate
  modified_base 4: mod_base = OTHER; note = 2'-O-methyl adenosine
  modified_base 5: mod_base = OTHER; note = 2'-O-methyl adenosine
  modified_base 6: mod_base = OTHER; note = 2'-O-methyl cytidine
  modified_base 7: mod_base = OTHER; note = Deoxythymidine phosphorothioate
  modified_base 8: mod_base = OTHER; note = 2'-O-methyl uridine
  modified_base 9: mod_base = OTHER; note = 2'-O-methyl guanosine
  modified_base 10: mod_base = OTHER; note = 2'-O-methyl uridine
  modified_base 11: mod_base = OTHER; note = 2'-O-methyl guanosine
  modified_base 12: mod_base = OTHER; note = 2'-fluoro guanosine
  modified_base 13: mod_base = OTHER; note = 2'-O-methyl cytidine
  modified_base 14: mod_base = OTHER; note = 2'-fluoro cytidine
  modified_base 15: mod_base = OTHER; note = 2'-O-methyl guanosine
  modified_base 16: mod_base = OTHER; note = 2'-fluoro uridine
  modified_base 17: mod_base = OTHER; note = 2'-O-methyl uridine
  modified_base 18: mod_base = OTHER; note = 2'-O-methyl uridine
  modified_base 19: mod_base = OTHER; note = 2'-fluoro adenosine
  modified_base 20: mod_base = OTHER; note = 2'-O-methyl cytidine
  modified_base 21: mod_base = OTHER; note = 2'-fluoro guanosine
  modified_base 22: mod_base = OTHER; note = 2'-O-methyl uridine
  modified_base 23: mod_base = OTHER; note = 2'-O-methyl cytidine
  modified_base 24: mod_base = OTHER; note = 2'-O-methyl guanosine
  modified_base 25: mod_base = OTHER; note = 2'-O-methyl guanosine
  modified_base 28: mod_base = OTHER; note = 2'-O-methyl guanosine
  modified_base 29: mod_base = OTHER; note = 2'-O-methyl uridine
  modified_base 30: mod_base = OTHER; note = 2'-O-methyl adenosine
  modified_base 31: mod_base = OTHER; note = 2'-O-methyl guanosine
  modified_base 32: mod_base = OTHER; note = 2'-O-methyl cytidine
  modified_base 35: mod_base = OTHER; note = 2'-O-methyl cytidine
  modified_base 36: mod_base = OTHER; note = Deoxycytidine phosphorothioate
  modified_base 37: mod_base = OTHER; note = Deoxythymidine phosphorothioate
  modified_base 38: mod_base = OTHER; note = 2'-O-methyl uridine
  modified_base 39: mod_base = OTHER; note = 2'-O-methyl uridine
  modified_base 40: mod_base = OTHER; note = 2'-O-methyl cytidine
  modified_base 41: mod_base = OTHER; note = 2'-O-methyl uridine
  modified_base 42: mod_base = OTHER; note = 2'-O-methyl cytidine
  modified_base 43: mod_base = OTHER; note = 2'-O-methyl adenosine
  modified_base 44: mod_base = OTHER; note = 2'-O-methyl uridine
  modified_base 45: mod_base = OTHER; note = 2'-O-methyl uridine phosphorothioate
  modified_base 46: mod_base = OTHER; note = 2'-O-methyl uridine phosphorothioate
  modified_base 47: mod_base = OTHER; note = 2'-O-methyl cytidine phosphorothioate
  modified_base 48: mod_base = OTHER; note = 2'-O-methyl guanosine
  misc_feature 1..6: note = RNA
  misc_feature 7: note = DNA
  misc_feature 8..35: note = RNA
  misc_feature 36..37: note = DNA
  misc_feature 38..48: note = RNA

SEQ ID NO: 412 - DNA, 48 bp, synthetic construct; identical to SEQ ID NO: 317
  source 1..48: mol_type = other DNA
  modified_base 1: mod_base = OTHER; note = 2'-O-methyl cytidine phosphorothioate
  modified_base 2: mod_base = OTHER; note = 2'-O-methyl uridine phosphorothioate
  modified_base 3: mod_base = OTHER; note = 2'-O-methyl guanosine phosphorothioate
  modified_base 4: mod_base = OTHER; note = 2'-O-methyl adenosine
  modified_base 5: mod_base = OTHER; note = 2'-O-methyl adenosine
  modified_base 6: mod_base = OTHER; note = 2'-O-methyl cytidine
  modified_base 7: mod_base = OTHER; note = Deoxythymidine phosphorothioate
  modified_base 8: mod_base = OTHER; note = 2'-O-methyl uridine
  modified_base 9: mod_base = OTHER; note = 2'-O-methyl guanosine
  modified_base 10: mod_base = OTHER; note = 2'-O-methyl uridine
  modified_base 11: mod_base = OTHER; note = 2'-O-methyl guanosine
  modified_base 12: mod_base = OTHER; note = 2'-fluoro guanosine
  modified_base 13: mod_base = OTHER; note = 2'-O-methyl cytidine
  modified_base 14: mod_base = OTHER; note = 2'-fluoro cytidine
  modified_base 15: mod_base = OTHER; note = 2'-O-methyl guanosine
  modified_base 16: mod_base = OTHER; note = 2'-fluoro uridine
  modified_base 17: mod_base = OTHER; note = 2'-O-methyl uridine
  modified_base 18: mod_base = OTHER; note = 2'-O-methyl uridine
  modified_base 19: mod_base = OTHER; note = 2'-fluoro adenosine
  modified_base 20: mod_base = OTHER; note = 2'-O-methyl cytidine
  modified_base 21: mod_base = OTHER; note = 2'-fluoro guanosine
  modified_base 22: mod_base = OTHER; note = 2'-O-methyl uridine
  modified_base 23: mod_base = OTHER; note = 2'-O-methyl cytidine
  modified_base 24: mod_base = OTHER; note = 2'-O-methyl guanosine
  modified_base 25: mod_base = OTHER; note = 2'-O-methyl guanosine
  modified_base 28: mod_base = OTHER; note = 2'-O-methyl guanosine
  modified_base 29: mod_base = OTHER; note = 2'-O-methyl uridine
  modified_base 30: mod_base = OTHER; note = 2'-O-methyl adenosine
  modified_base 31: mod_base = OTHER; note = 2'-O-methyl guanosine
  modified_base 32: mod_base = OTHER; note = 2'-O-methyl cytidine
  modified_base 35: mod_base = OTHER; note = 2'-O-methyl cytidine
  modified_base 36: mod_base = OTHER; note = 2'-O-methyl cytidine
  modified_base 37: mod_base = OTHER; note = Deoxythymidine phosphorothioate
  modified_base 38: mod_base = OTHER; note = 2'-O-methyl uridine
  modified_base 39: mod_base = OTHER; note = 2'-O-methyl uridine
  modified_base 40: mod_base = OTHER; note = 2'-O-methyl cytidine
  modified_base 41: mod_base = OTHER; note = 2'-O-methyl uridine
  modified_base 42: mod_base = OTHER; note = 2'-O-methyl cytidine
  modified_base 43: mod_base = OTHER; note = 2'-O-methyl adenosine
  modified_base 44: mod_base = OTHER; note = 2'-O-methyl uridine
  modified_base 45: mod_base = OTHER; note = 2'-O-methyl uridine phosphorothioate
  modified_base 46: mod_base = OTHER; note = 2'-O-methyl uridine phosphorothioate
  modified_base 47: mod_base = OTHER; note = 2'-O-methyl cytidine phosphorothioate
  modified_base 48: mod_base = OTHER; note = 2'-O-methyl guanosine
  misc_feature 1..6: note = RNA
  misc_feature 7: note = DNA
  misc_feature 8..36: note = RNA
  misc_feature 37: note = DNA
  misc_feature 38..48: note = RNA

SEQ ID NO: 413 - DNA, 48 bp, synthetic construct; identical to SEQ ID NO: 317
  source 1..48: mol_type = other DNA
  modified_base 1: mod_base = OTHER; note = 2'-O-methyl cytidine phosphorothioate
  modified_base 2: mod_base = OTHER; note = 2'-O-methyl uridine phosphorothioate
  modified_base 3: mod_base = OTHER; note = 2'-O-methyl guanosine phosphorothioate
  modified_base 4: mod_base = OTHER; note = 2'-O-methyl adenosine
  modified_base 5: mod_base = OTHER; note = 2'-O-methyl adenosine
  modified_base 6: mod_base = OTHER; note = 2'-O-methyl cytidine
  modified_base 7: mod_base = OTHER; note = Deoxythymidine phosphorothioate
  modified_base 8: mod_base = OTHER; note = 2'-O-methyl uridine
  modified_base 9: mod_base = OTHER; note = 2'-O-methyl guanosine
  modified_base 10: mod_base = OTHER; note = 2'-O-methyl uridine
  modified_base 11: mod_base = OTHER; note = 2'-O-methyl guanosine
  modified_base 12: mod_base = OTHER; note = 2'-fluoro guanosine
  modified_base 13: mod_base = OTHER; note = 2'-O-methyl cytidine
  modified_base 14: mod_base = OTHER; note = 2'-fluoro cytidine
  modified_base 15: mod_base = OTHER; note = 2'-O-methyl guanosine
  modified_base 16: mod_base = OTHER; note = 2'-fluoro uridine
  modified_base 17: mod_base = OTHER; note = 2'-O-methyl uridine
  modified_base 18: mod_base = OTHER; note = 2'-O-methyl uridine
  modified_base 19: mod_base = OTHER; note = 2'-fluoro adenosine
  modified_base 20: mod_base = OTHER; note = 2'-O-methyl cytidine
  modified_base 21: mod_base = OTHER; note = 2'-fluoro guanosine
  modified_base 22: mod_base = OTHER; note = 2'-O-methyl uridine
  modified_base 23: mod_base = OTHER; note = 2'-O-methyl cytidine
  modified_base 24: mod_base = OTHER; note = 2'-O-methyl guanosine
  modified_base 25: mod_base = OTHER; note = 2'-O-methyl guanosine
  modified_base 28: mod_base = OTHER; note = 2'-O-methyl guanosine
  modified_base 29: mod_base = OTHER; note = 2'-O-methyl uridine
  modified_base 30: mod_base = OTHER; note = 2'-O-methyl adenosine
  modified_base 31: mod_base = OTHER; note = 2'-O-methyl guanosine
  modified_base 32: mod_base = OTHER; note = 2'-O-methyl cytidine
  modified_base 33: mod_base = OTHER; note = Deoxythymidine phosphorothioate
  modified_base 35: mod_base = OTHER; note = Deoxycytidine phosphorothioate
  modified_base 37: mod_base = OTHER; note = Deoxythymidine phosphorothioate
  modified_base 38: mod_base = OTHER; note = 2'-O-methyl uridine
  modified_base 39: mod_base = OTHER; note = 2'-O-methyl uridine
  modified_base 40: mod_base = OTHER; note = 2'-O-methyl cytidine
  modified_base 41: mod_base = OTHER; note = 2'-O-methyl uridine
  modified_base 42: mod_base = OTHER; note = 2'-O-methyl cytidine
  modified_base 43: mod_base = OTHER; note = 2'-O-methyl adenosine
  modified_base 44: mod_base = OTHER; note = 2'-O-methyl uridine
  modified_base 45: mod_base = OTHER; note = 2'-O-methyl uridine phosphorothioate
  modified_base 46: mod_base = OTHER; note = 2'-O-methyl uridine phosphorothioate
  modified_base 47: mod_base = OTHER; note = 2'-O-methyl cytidine phosphorothioate
  modified_base 48: mod_base = OTHER; note = 2'-O-methyl guanosine
  misc_feature 1..6: note = RNA
  misc_feature 7: note = DNA
  misc_feature 8..32: note = RNA
  misc_feature 33: note = DNA
  misc_feature 34: note = RNA
  misc_feature 35: note = DNA
  misc_feature 36: note = RNA
  misc_feature 37: note = DNA
  misc_feature 38..48: note = RNA

SEQ ID NO: 414 - DNA, 48 bp, synthetic construct; identical to SEQ ID NO: 317
  source 1..48: mol_type = other DNA
  modified_base 1: mod_base = OTHER; note = 2'-O-methyl cytidine phosphorothioate
  modified_base 2: mod_base = OTHER; note = 2'-O-methyl uridine phosphorothioate
  modified_base 3: mod_base = OTHER; note = 2'-O-methyl guanosine phosphorothioate
  modified_base 4: mod_base = OTHER; note = 2'-O-methyl adenosine
  modified_base 5: mod_base = OTHER; note = 2'-O-methyl adenosine
  modified_base 6: mod_base = OTHER; note = 2'-O-methyl cytidine
  modified_base 7: mod_base = OTHER; note = Deoxythymidine phosphorothioate
  modified_base 8: mod_base = OTHER; note = 2'-O-methyl uridine
  modified_base 9: mod_base = OTHER; note = 2'-O-methyl guanosine
  modified_base 10: mod_base = OTHER; note = 2'-O-methyl uridine
  modified_base 11: mod_base = OTHER; note = 2'-O-methyl guanosine
  modified_base 12: mod_base = OTHER; note = 2'-fluoro guanosine
  modified_base 13: mod_base = OTHER; note = 2'-O-methyl cytidine
  modified_base 14: mod_base = OTHER; note = 2'-fluoro cytidine
  modified_base 15: mod_base = OTHER; note = 2'-O-methyl guanosine
  modified_base 16: mod_base = OTHER; note = 2'-fluoro uridine
  modified_base 17: mod_base = OTHER; note = 2'-O-methyl uridine
  modified_base 18: mod_base = OTHER; note = 2'-O-methyl uridine
  modified_base 19: mod_base = OTHER; note = 2'-fluoro adenosine
  modified_base 20: mod_base = OTHER; note = 2'-O-methyl cytidine
  modified_base 21: mod_base = OTHER; note = 2'-fluoro guanosine
  modified_base 22: mod_base = OTHER; note = 2'-O-methyl uridine
  modified_base 23: mod_base = OTHER; note = 2'-O-methyl cytidine
  modified_base 24: mod_base = OTHER; note = 2'-O-methyl guanosine
  modified_base 25: mod_base = OTHER; note = 2'-O-methyl guanosine
  modified_base 28: mod_base = OTHER; note = 2'-O-methyl guanosine
  modified_base 29: mod_base = OTHER; note = 2'-O-methyl uridine
  modified_base 30: mod_base = OTHER; note = 2'-O-methyl adenosine
  modified_base 31: mod_base = OTHER; note = 2'-O-methyl guanosine
  modified_base 32: mod_base = OTHER; note = 2'-O-methyl cytidine
  modified_base 33: mod_base = OTHER; note = Deoxythymidine phosphorothioate
  modified_base 35: mod_base = OTHER; note = Deoxycytidine phosphorothioate
  modified_base 36: mod_base = OTHER; note = Deoxycytidine phosphorothioate
  modified_base 37: mod_base = OTHER; note = Deoxythymidine phosphorothioate
  modified_base 38: mod_base = OTHER; note = 2'-O-methyl uridine
  modified_base 39: mod_base = OTHER; note = 2'-O-methyl uridine
  modified_base 40: mod_base = OTHER; note = 2'-O-methyl cytidine
  modified_base 41: mod_base = OTHER; note = 2'-O-methyl uridine
  modified_base 42: mod_base = OTHER; note = 2'-O-methyl cytidine
  modified_base 43: mod_base = OTHER; note = 2'-O-methyl adenosine
  modified_base 44: mod_base = OTHER; note = 2'-O-methyl uridine
  modified_base 45: mod_base = OTHER; note = 2'-O-methyl uridine phosphorothioate
  modified_base 46: mod_base = OTHER; note = 2'-O-methyl uridine phosphorothioate
  modified_base 47: mod_base = OTHER; note = 2'-O-methyl cytidine phosphorothioate
  modified_base 48: mod_base = OTHER; note = 2'-O-methyl guanosine
  misc_feature 1..6: note = RNA
  misc_feature 7: note = DNA
  misc_feature 8..32: note = RNA
  misc_feature 33: note = DNA
  misc_feature 34: note = RNA
  misc_feature 35..37: note = DNA
  misc_feature 38..48: note = RNA

SEQ ID NO: 415 - DNA, 48 bp, synthetic construct; identical to SEQ ID NO: 317
  source 1..48: mol_type = other DNA
  modified_base 1: mod_base = OTHER; note = 2'-O-methyl cytidine phosphorothioate
  modified_base 2: mod_base = OTHER; note = 2'-O-methyl uridine phosphorothioate
  modified_base 3: mod_base = OTHER; note = 2'-O-methyl guanosine phosphorothioate
  modified_base 4: mod_base = OTHER; note = 2'-O-methyl adenosine
  modified_base 5: mod_base = OTHER; note = 2'-O-methyl adenosine
  modified_base 6: mod_base = OTHER; note = 2'-O-methyl cytidine
  modified_base 7: mod_base = OTHER; note = Deoxythymidine phosphorothioate
  modified_base 8: mod_base = OTHER; note = 2'-O-methyl uridine
  modified_base 9: mod_base = OTHER; note = 2'-O-methyl guanosine
  modified_base 10: mod_base = OTHER; note = 2'-O-methyl uridine
  modified_base 11: mod_base = OTHER; note = 2'-O-methyl guanosine
  modified_base 12: mod_base = OTHER; note = 2'-fluoro guanosine
  modified_base 13: mod_base = OTHER; note = 2'-O-methyl cytidine
  modified_base 14: mod_base = OTHER; note = 2'-fluoro cytidine
  modified_base 15: mod_base = OTHER; note = 2'-O-methyl guanosine
  modified_base 16: mod_base = OTHER; note = 2'-fluoro uridine
  modified_base 17: mod_base = OTHER; note = 2'-O-methyl uridine
  modified_base 18: mod_base = OTHER; note = 2'-O-methyl uridine
  modified_base 19: mod_base = OTHER; note = 2'-fluoro adenosine
  modified_base 20: mod_base = OTHER; note = 2'-O-methyl cytidine
  modified_base 21: mod_base = OTHER; note = 2'-fluoro guanosine
  modified_base 22: mod_base = OTHER; note = 2'-O-methyl uridine
  modified_base 23: mod_base = OTHER; note = 2'-O-methyl cytidine
  modified_base 24: mod_base = OTHER; note = 2'-O-methyl guanosine
  modified_base 25: mod_base = OTHER; note = 2'-O-methyl guanosine
  modified_base 28: mod_base = OTHER; note = 2'-O-methyl guanosine
  modified_base 29: mod_base = OTHER; note = 2'-O-methyl uridine
  modified_base 30: mod_base = OTHER; note = 2'-O-methyl adenosine
  modified_base 31: mod_base = OTHER; note = 2'-O-methyl guanosine
  modified_base 32: mod_base = OTHER; note = 2'-O-methyl cytidine
  modified_base 33: mod_base = OTHER; note = Deoxythymidine phosphorothioate
  modified_base 35: mod_base = OTHER; note = 2'-O-methyl cytidine
  modified_base 36: mod_base = OTHER; note = Deoxycytidine phosphorothioate
  modified_base 37: mod_base = OTHER; note = Deoxythymidine phosphorothioate
  modified_base 38: mod_base = OTHER; note = 2'-O-methyl uridine
  modified_base 39: mod_base = OTHER; note = 2'-O-methyl uridine
  modified_base 40: mod_base = OTHER; note = 2'-O-methyl cytidine
  modified_base 41: mod_base = OTHER; note = 2'-O-methyl uridine
  modified_base 42: mod_base = OTHER; note = 2'-O-methyl cytidine
  modified_base 43: mod_base = OTHER; note = 2'-O-methyl adenosine
  modified_base 44: mod_base = OTHER; note = 2'-O-methyl uridine
  modified_base 45: mod_base = OTHER; note = 2'-O-methyl uridine phosphorothioate
  modified_base 46: mod_base = OTHER; note = 2'-O-methyl uridine phosphorothioate
  modified_base 47: mod_base = OTHER; note = 2'-O-methyl cytidine phosphorothioate
  modified_base 48: mod_base = OTHER; note = 2'-O-methyl guanosine
  misc_feature 1..6: note = RNA
  misc_feature 7: note = DNA
  misc_feature 8..32: note = RNA
  misc_feature 33: note = DNA
  misc_feature 34..35: note = RNA
  misc_feature 36..37: note = DNA
  misc_feature 38..48: note = RNA

SEQ ID NO: 416 - DNA, 48 bp, synthetic construct; identical to SEQ ID NO: 317
  source 1..48: mol_type = other DNA
  modified_base 1: mod_base = OTHER; note = 2'-O-methyl cytidine phosphorothioate
  modified_base 2: mod_base = OTHER; note = 2'-O-methyl uridine phosphorothioate
  modified_base 3: mod_base = OTHER; note = 2'-O-methyl guanosine phosphorothioate
  modified_base 4: mod_base = OTHER; note = 2'-O-methyl adenosine
  modified_base 5: mod_base = OTHER; note = 2'-O-methyl adenosine
  modified_base 6: mod_base = OTHER; note = 2'-O-methyl cytidine
  modified_base 7: mod_base = OTHER; note = Deoxythymidine phosphorothioate
  modified_base 8: mod_base = OTHER; note = 2'-O-methyl uridine
  modified_base 9: mod_base = OTHER; note = 2'-O-methyl guanosine
  modified_base 10: mod_base = OTHER; note = 2'-O-methyl uridine
  modified_base 11: mod_base = OTHER; note = 2'-O-methyl guanosine
  modified_base 12: mod_base = OTHER; note = 2'-fluoro guanosine
  modified_base 13: mod_base = OTHER; note = 2'-O-methyl cytidine
  modified_base 14: mod_base = OTHER; note = 2'-fluoro cytidine
  modified_base 15: mod_base = OTHER; note = 2'-O-methyl guanosine
  modified_base 16: mod_base = OTHER; note = 2'-fluoro uridine
  modified_base 17: mod_base = OTHER; note = 2'-O-methyl uridine
  modified_base 18: mod_base = OTHER; note = 2'-O-methyl uridine
  modified_base 19: mod_base = OTHER; note = 2'-fluoro adenosine
  modified_base 20: mod_base = OTHER; note = 2'-O-methyl cytidine
  modified_base 21: mod_base = OTHER; note = 2'-fluoro guanosine
  modified_base 22: mod_base = OTHER; note = 2'-O-methyl uridine
  modified_base 23: mod_base = OTHER; note = 2'-O-methyl cytidine
  modified_base 24: mod_base = OTHER; note = 2'-O-methyl guanosine
  modified_base 25: mod_base = OTHER; note = 2'-O-methyl guanosine
  modified_base 28: mod_base = OTHER; note = 2'-O-methyl guanosine
  modified_base 29: mod_base = OTHER; note = 2'-O-methyl uridine
  modified_base 30: mod_base = OTHER; note = 2'-O-methyl adenosine
  modified_base 31: mod_base = OTHER; note = 2'-O-methyl guanosine
  modified_base 32: mod_base = OTHER; note = 2'-O-methyl cytidine
  modified_base 33: mod_base = OTHER; note = Deoxythymidine phosphorothioate
  modified_base 35: mod_base = OTHER; note = 2'-O-methyl cytidine
  modified_base 36: mod_base = OTHER; note = 2'-O-methyl cytidine
  modified_base 37: mod_base = OTHER; note = Deoxythymidine phosphorothioate
  modified_base 38: mod_base = OTHER; note = 2'-O-methyl uridine
  modified_base 39: mod_base = OTHER; note = 2'-O-methyl uridine
  modified_base 40: mod_base = OTHER; note = 2'-O-methyl cytidine
  modified_base 41: mod_base = OTHER; note = 2'-O-methyl uridine
  modified_base 42: mod_base = OTHER; note = 2'-O-methyl cytidine
  modified_base 43: mod_base = OTHER; note = 2'-O-methyl adenosine
  modified_base 44: mod_base = OTHER; note = 2'-O-methyl uridine
  modified_base 45: mod_base = OTHER; note = 2'-O-methyl uridine phosphorothioate
  modified_base 46: mod_base = OTHER; note = 2'-O-methyl uridine phosphorothioate
  modified_base 47: mod_base = OTHER; note = 2'-O-methyl cytidine phosphorothioate
  modified_base 48: mod_base = OTHER; note = 2'-O-methyl guanosine
  misc_feature 1..6: note = RNA
  misc_feature 7: note = DNA
  misc_feature 8..32: note = RNA
  misc_feature 33: note = DNA
  misc_feature 34..36: note = RNA
  misc_feature 37: note = DNA
  misc_feature 38..48: note = RNA

SEQ ID NO: 417 - DNA, 48 bp, synthetic construct; identical to SEQ ID NO: 317
  source 1..48: mol_type = other DNA
  modified_base 1: mod_base = OTHER; note = 2'-O-methyl cytidine phosphorothioate
  modified_base 2: mod_base = OTHER; note = 2'-O-methyl uridine phosphorothioate
  modified_base 3: mod_base = OTHER; note = 2'-O-methyl guanosine phosphorothioate
  modified_base 4: mod_base = OTHER; note = 2'-O-methyl adenosine
  modified_base 5: mod_base = OTHER; note = 2'-O-methyl adenosine
  modified_base 6: mod_base = OTHER; note = 2'-O-methyl cytidine
  modified_base 7: mod_base = OTHER; note = Deoxythymidine phosphorothioate
  modified_base 8: mod_base = OTHER; note = 2'-O-methyl uridine
  modified_base 9: mod_base = OTHER; note = 2'-O-methyl guanosine
  modified_base 10: mod_base = OTHER; note = 2'-O-methyl uridine
  modified_base 11: mod_base = OTHER; note = 2'-O-methyl guanosine
  modified_base 12: mod_base = OTHER; note = 2'-fluoro guanosine
  modified_base 13: mod_base = OTHER; note = 2'-O-methyl cytidine
  modified_base 14: mod_base = OTHER; note = 2'-fluoro cytidine
  modified_base 15: mod_base = OTHER; note = 2'-O-methyl guanosine
  modified_base 16: mod_base = OTHER; note = 2'-fluoro uridine
  modified_base 17: mod_base = OTHER; note = 2'-O-methyl uridine
  modified_base 18: mod_base = OTHER; note = 2'-O-methyl uridine
  modified_base 19: mod_base = OTHER; note = 2'-fluoro adenosine
  modified_base 20: mod_base = OTHER; note = 2'-O-methyl cytidine
  modified_base 21: mod_base = OTHER; note = 2'-fluoro guanosine
  modified_base 22: mod_base = OTHER; note = 2'-O-methyl uridine
  modified_base 23: mod_base = OTHER; note = 2'-O-methyl cytidine
  modified_base 24: mod_base = OTHER; note = 2'-O-methyl guanosine
  modified_base 25: mod_base = OTHER; note = 2'-O-methyl guanosine
  modified_base 26: mod_base = OTHER; note = Deoxythymidine phosphorothioate
  modified_base 28: mod_base = OTHER; note = 2'-O-methyl guanosine
  modified_base 29: mod_base = OTHER; note = 2'-O-methyl uridine
  modified_base 30: mod_base = OTHER; note = 2'-O-methyl adenosine
  modified_base 31: mod_base = OTHER; note = 2'-O-methyl guanosine
  modified_base 32: mod_base = OTHER; note = 2'-O-methyl cytidine
  modified_base 33: mod_base = OTHER; note = Deoxythymidine phosphorothioate
  modified_base 35: mod_base = OTHER; note = Deoxycytidine phosphorothioate
  modified_base 37: mod_base = OTHER; note = Deoxythymidine phosphorothioate
  modified_base 38: mod_base = OTHER; note = 2'-O-methyl uridine
  modified_base 39: mod_base = OTHER; note = 2'-O-methyl uridine
  modified_base 40: mod_base = OTHER; note = 2'-O-methyl cytidine
  modified_base 41: mod_base = OTHER; note = 2'-O-methyl uridine
  modified_base 42: mod_base = OTHER; note = 2'-O-methyl cytidine
  modified_base 43: mod_base = OTHER; note = 2'-O-methyl adenosine
  modified_base 44: mod_base = OTHER; note = 2'-O-methyl uridine
  modified_base 45: mod_base = OTHER; note = 2'-O-methyl uridine phosphorothioate
  modified_base 46: mod_base = OTHER; note = 2'-O-methyl uridine phosphorothioate
  modified_base 47: mod_base = OTHER; note = 2'-O-methyl cytidine phosphorothioate
  modified_base 48: mod_base = OTHER; note = 2'-O-methyl guanosine
  misc_feature 1..6: note = RNA
  misc_feature 7: note = DNA
  misc_feature 8..25: note = RNA
  misc_feature 26: note = DNA
  misc_feature 27..32: note = RNA
  misc_feature 33: note = DNA
  misc_feature 34: note = RNA
  misc_feature 35: note = DNA
  misc_feature 36: note = RNA
  misc_feature 37: note = DNA
  misc_feature 38..48: note = RNA

SEQ ID NO: 418 - DNA, 48 bp, synthetic construct; identical to SEQ ID NO: 317
  source 1..48: mol_type = other DNA
  modified_base 1: mod_base = OTHER; note = 2'-O-methyl cytidine phosphorothioate
  modified_base 2: mod_base = OTHER; note = 2'-O-methyl uridine phosphorothioate
  modified_base 3: mod_base = OTHER; note = 2'-O-methyl guanosine phosphorothioate
  modified_base 4: mod_base = OTHER; note = 2'-O-methyl adenosine
  modified_base 5: mod_base = OTHER; note = 2'-O-methyl adenosine
  modified_base 6: mod_base = OTHER; note = 2'-O-methyl cytidine
  modified_base 7: mod_base = OTHER; note = Deoxythymidine phosphorothioate
  modified_base 8: mod_base = OTHER; note = 2'-O-methyl uridine
  modified_base 9: mod_base = OTHER; note = 2'-O-methyl guanosine
  modified_base 10: mod_base = OTHER; note = 2'-O-methyl uridine
  modified_base 11: mod_base = OTHER; note = 2'-O-methyl guanosine
  modified_base 12: mod_base = OTHER; note = 2'-fluoro guanosine
  modified_base 13: mod_base = OTHER; note = 2'-O-methyl cytidine
  modified_base 14: mod_base = OTHER; note = 2'-fluoro cytidine
  modified_base 15: mod_base = OTHER; note = 2'-O-methyl guanosine
  modified_base 16: mod_base = OTHER; note = 2'-fluoro uridine
  modified_base 17: mod_base = OTHER; note = 2'-O-methyl uridine
  modified_base 18: mod_base = OTHER; note = 2'-O-methyl uridine
  modified_base 19: mod_base = OTHER; note = 2'-fluoro adenosine
  modified_base 20: mod_base = OTHER; note = 2'-O-methyl cytidine
  modified_base 21: mod_base = OTHER; note = 2'-fluoro guanosine
  modified_base 22: mod_base = OTHER; note = 2'-O-methyl uridine
  modified_base 23: mod_base = OTHER; note = 2'-O-methyl cytidine
  modified_base 24: mod_base = OTHER; note = 2'-O-methyl guanosine
  modified_base 25: mod_base = OTHER; note = 2'-O-methyl guanosine
  modified_base 26: mod_base = OTHER; note = Deoxythymidine phosphorothioate
  modified_base 28: mod_base = OTHER; note = 2'-O-methyl guanosine
  modified_base 29: mod_base = OTHER; note = 2'-O-methyl uridine
  modified_base 30: mod_base = OTHER; note = 2'-O-methyl adenosine
  modified_base 31: mod_base = OTHER; note = 2'-O-methyl guanosine
  modified_base 32: mod_base = OTHER; note = 2'-O-methyl cytidine
  modified_base 33: mod_base = OTHER; note = Deoxythymidine phosphorothioate
  modified_base 35: mod_base = OTHER; note = Deoxycytidine phosphorothioate
  modified_base 36: mod_base = OTHER; note = Deoxycytidine phosphorothioate
  modified_base 37: mod_base = OTHER; note = Deoxythymidine phosphorothioate
  modified_base 38: mod_base = OTHER; note = 2'-O-methyl uridine
  modified_base 39: mod_base = OTHER; note = 2'-O-methyl uridine
  modified_base 40: mod_base = OTHER; note = 2'-O-methyl cytidine
  modified_base 41: mod_base = OTHER; note = 2'-O-methyl uridine
  modified_base 42: mod_base = OTHER; note = 2'-O-methyl cytidine
  modified_base 43: mod_base = OTHER; note = 2'-O-methyl adenosine
  modified_base 44: mod_base = OTHER; note = 2'-O-methyl uridine
  modified_base 45: mod_base = OTHER; note = 2'-O-methyl uridine phosphorothioate
  modified_base 46: mod_base = OTHER; note = 2'-O-methyl uridine phosphorothioate
  modified_base 47: mod_base = OTHER; note = 2'-O-methyl cytidine phosphorothioate
  modified_base 48: mod_base = OTHER; note = 2'-O-methyl guanosine
  misc_feature 1..6: note = RNA
  misc_feature 7: note = DNA
  misc_feature 8..25: note = RNA
  misc_feature 26: note = DNA
  misc_feature 27..32: note = RNA
  misc_feature 33: note = DNA
  misc_feature 34: note = RNA
  misc_feature 35..37: note = DNA
  misc_feature 38..48: note = RNA

SEQ ID NO: 419 - DNA, 48 bp, synthetic construct; identical to SEQ ID NO: 317
  source 1..48: mol_type = other DNA
  modified_base 1: mod_base = OTHER; note = 2'-O-methyl cytidine phosphorothioate
  modified_base 2: mod_base = OTHER; note = 2'-O-methyl uridine phosphorothioate
  modified_base 3: mod_base = OTHER; note = 2'-O-methyl guanosine phosphorothioate
  modified_base 4: mod_base = OTHER; note = 2'-O-methyl adenosine
  modified_base 5: mod_base = OTHER; note = 2'-O-methyl adenosine
  modified_base 6: mod_base = OTHER; note = 2'-O-methyl cytidine
  modified_base 7: mod_base = OTHER; note = Deoxythymidine phosphorothioate
  modified_base 8: mod_base = OTHER; note = 2'-O-methyl uridine
  modified_base 9: mod_base = OTHER; note = 2'-O-methyl guanosine
  modified_base 10: mod_base = OTHER; note = 2'-O-methyl uridine
  modified_base 11: mod_base = OTHER; note = 2'-O-methyl guanosine
  modified_base 12: mod_base = OTHER; note = 2'-fluoro guanosine
  modified_base 13: mod_base = OTHER; note = 2'-O-methyl cytidine
  modified_base 14: mod_base = OTHER; note = 2'-fluoro cytidine
  modified_base 15: mod_base = OTHER; note = 2'-O-methyl guanosine
  modified_base 16: mod_base = OTHER; note = 2'-fluoro uridine
  modified_base 17: mod_base = OTHER; note = 2'-O-methyl uridine
  modified_base 18: mod_base = OTHER; note = 2'-O-methyl uridine
  modified_base 19: mod_base = OTHER; note = 2'-fluoro adenosine
  modified_base 20: mod_base = OTHER; note = 2'-O-methyl cytidine
  modified_base 21: mod_base = OTHER; note = 2'-fluoro guanosine
  modified_base 22: mod_base = OTHER; note = 2'-O-methyl uridine
  modified_base 23: mod_base = OTHER; note = 2'-O-methyl cytidine
  modified_base 24: mod_base = OTHER; note = 2'-O-methyl guanosine
  modified_base 25: mod_base = OTHER; note = 2'-O-methyl guanosine
  modified_base 26: mod_base = OTHER; note = Deoxythymidine phosphorothioate
  modified_base 28: mod_base = OTHER; note = 2'-O-methyl guanosine
  modified_base 29: mod_base = OTHER; note = 2'-O-methyl uridine
  modified_base 30: mod_base = OTHER; note = 2'-O-methyl adenosine
  modified_base 31: mod_base = OTHER; note = 2'-O-methyl guanosine
  modified_base 32: mod_base = OTHER; note = 2'-O-methyl cytidine
  modified_base 33: mod_base = OTHER; note = Deoxythymidine phosphorothioate
  modified_base 35: mod_base = OTHER; note = 2'-O-methyl cytidine
  modified_base 36: mod_base = OTHER; note = Deoxycytidine phosphorothioate
  modified_base 37: mod_base = OTHER; note = Deoxythymidine phosphorothioate
  modified_base 38: mod_base = OTHER; note = 2'-O-methyl uridine
  modified_base 39: mod_base = OTHER; note = 2'-O-methyl uridine
  modified_base 40: mod_base = OTHER; note = 2'-O-methyl cytidine
  modified_base 41: mod_base = OTHER; note = 2'-O-methyl uridine
  modified_base 42: mod_base = OTHER; note = 2'-O-methyl cytidine
  modified_base 43: mod_base = OTHER; note = 2'-O-methyl adenosine
  modified_base 44: mod_base = OTHER; note = 2'-O-methyl uridine
  modified_base 45: mod_base = OTHER; note = 2'-O-methyl uridine phosphorothioate
  modified_base 46: mod_base = OTHER; note = 2'-O-methyl uridine phosphorothioate
  modified_base 47: mod_base = OTHER; note = 2'-O-methyl cytidine phosphorothioate
  modified_base 48: mod_base = OTHER; note = 2'-O-methyl guanosine
  misc_feature 1..6: note = RNA
  misc_feature 7: note = DNA
  misc_feature 8..25: note = RNA
  misc_feature 26: note = DNA
  misc_feature 27..32: note = RNA
  misc_feature 33: note = DNA
  misc_feature 34..35: note = RNA
  misc_feature 36..37: note = DNA
  misc_feature 38..48: note = RNA

SEQ ID NO: 420 - DNA, 48 bp, synthetic construct; identical to SEQ ID NO: 317
  source 1..48: mol_type = other DNA
  modified_base 1: mod_base = OTHER; note = 2'-O-methyl cytidine phosphorothioate
  modified_base 2: mod_base = OTHER; note = 2'-O-methyl uridine phosphorothioate
  modified_base 3: mod_base = OTHER; note = 2'-O-methyl guanosine phosphorothioate
  modified_base 4: mod_base = OTHER; note = 2'-O-methyl adenosine
  modified_base 5: mod_base = OTHER; note = 2'-O-methyl adenosine
  modified_base 6: mod_base = OTHER; note = 2'-O-methyl cytidine
  modified_base 7: mod_base = OTHER; note = Deoxythymidine phosphorothioate
  modified_base 8: mod_base = OTHER; note = 2'-O-methyl uridine
  modified_base 9: mod_base = OTHER; note = 2'-O-methyl guanosine
  modified_base 10: mod_base = OTHER; note = 2'-O-methyl uridine
  modified_base 11: mod_base = OTHER; note = 2'-O-methyl guanosine
  modified_base 12: mod_base = OTHER; note = 2'-fluoro guanosine
  modified_base 13: mod_base = OTHER; note = 2'-O-methyl cytidine
  modified_base 14: mod_base = OTHER; note = 2'-fluoro cytidine
  modified_base 15: mod_base = OTHER; note = 2'-O-methyl guanosine
  modified_base 16: mod_base = OTHER; note = 2'-fluoro uridine
  modified_base 17: mod_base = OTHER; note = 2'-O-methyl uridine
  modified_base 18: mod_base = OTHER; note = 2'-O-methyl uridine
  modified_base 19: mod_base = OTHER; note = 2'-fluoro adenosine
  modified_base 20: mod_base = OTHER; note = 2'-O-methyl cytidine
  modified_base 21: mod_base = OTHER; note = 2'-fluoro guanosine
  modified_base 22: mod_base = OTHER; note = 2'-O-methyl uridine
  modified_base 23: mod_base = OTHER; note = 2'-O-methyl cytidine
  modified_base 24: mod_base = OTHER; note = 2'-O-methyl guanosine
  modified_base 25: mod_base = OTHER; note = 2'-O-methyl guanosine
  modified_base 26: mod_base = OTHER; note = Deoxythymidine phosphorothioate
  modified_base 28: mod_base = OTHER; note = 2'-O-methyl guanosine
  modified_base 29: mod_base = OTHER; note = 2'-O-methyl uridine
  modified_base 30: mod_base = OTHER; note = 2'-O-methyl adenosine
  modified_base 31: mod_base = OTHER; note = 2'-O-methyl guanosine
  modified_base 32: mod_base = OTHER; note = 2'-O-methyl cytidine
  modified_base 33: mod_base = OTHER; note = Deoxythymidine phosphorothioate
  modified_base 35: mod_base = OTHER; note = 2'-O-methyl cytidine
  modified_base 36: mod_base = OTHER; note = 2'-O-methyl cytidine
  modified_base 37: mod_base = OTHER; note = Deoxythymidine phosphorothioate
  modified_base 38: mod_base = OTHER; note = 2'-O-methyl uridine
  modified_base 39: mod_base = OTHER; note = 2'-O-methyl uridine
  modified_base 40: mod_base = OTHER; note = 2'-O-methyl cytidine
  modified_base 41: mod_base = OTHER; note = 2'-O-methyl uridine
  modified_base 42: mod_base = OTHER; note = 2'-O-methyl cytidine
  modified_base 43: mod_base = OTHER; note = 2'-O-methyl adenosine
  modified_base 44: mod_base = OTHER; note = 2'-O-methyl uridine
  modified_base 45: mod_base = OTHER; note = 2'-O-methyl uridine phosphorothioate
  modified_base 46: mod_base = OTHER; note = 2'-O-methyl uridine phosphorothioate
  modified_base 47: mod_base = OTHER; note = 2'-O-methyl cytidine phosphorothioate
  modified_base 48: mod_base = OTHER; note = 2'-O-methyl guanosine
  misc_feature 1..6: note = RNA
  misc_feature 7: note = DNA
  misc_feature 8..25: note = RNA
  misc_feature 26: note = DNA
  misc_feature 27..32: note = RNA
  misc_feature 33: note = DNA
  misc_feature 34..36: note = RNA
  misc_feature 37: note = DNA
  misc_feature 38..48: note = RNA

SEQ ID NO: 421 - DNA, 48 bp, synthetic construct; identical to SEQ ID NO: 317
  source 1..48: mol_type = other DNA
  modified_base 1: mod_base = OTHER; note = 2'-O-methyl cytidine phosphorothioate
  modified_base 2: mod_base = OTHER; note = 2'-O-methyl uridine phosphorothioate
  modified_base 3: mod_base = OTHER; note = 2'-O-methyl guanosine phosphorothioate
  modified_base 4: mod_base = OTHER; note = 2'-O-methyl adenosine
  modified_base 5: mod_base = OTHER; note = 2'-O-methyl adenosine
  modified_base 6: mod_base = OTHER; note = 2'-O-methyl cytidine
  modified_base 7: mod_base = OTHER; note = Deoxythymidine phosphorothioate
  modified_base 8: mod_base = OTHER; note = 2'-O-methyl uridine
  modified_base 9: mod_base = OTHER; note = 2'-O-methyl guanosine
  modified_base 10: mod_base = OTHER; note = 2'-O-methyl uridine
  modified_base 11: mod_base = OTHER; note = 2'-O-methyl guanosine
  modified_base 12: mod_base = OTHER; note = 2'-fluoro guanosine
  modified_base 13: mod_base = OTHER; note = 2'-O-methyl cytidine
  modified_base 14: mod_base = OTHER; note = 2'-fluoro cytidine
  modified_base 15: mod_base = OTHER; note = 2'-O-methyl guanosine
  modified_base 16: mod_base = OTHER; note = 2'-fluoro uridine
  modified_base 17: mod_base = OTHER; note = 2'-O-methyl uridine
  modified_base 18: mod_base = OTHER; note = 2'-O-methyl uridine
  modified_base 19: mod_base = OTHER; note = 2'-fluoro adenosine
  modified_base 20: mod_base = OTHER; note = 2'-O-methyl cytidine
  modified_base 21: mod_base = OTHER; note = 2'-fluoro guanosine
  modified_base 22: mod_base = OTHER; note = 2'-O-methyl uridine
  modified_base 23: mod_base = OTHER; note = 2'-O-methyl cytidine
  modified_base 24: mod_base = OTHER; note = 2'-O-methyl guanosine
  modified_base 25: mod_base = OTHER; note = 2'-O-methyl guanosine
  modified_base 26: mod_base = OTHER; note = Deoxythymidine phosphorothioate
  modified_base 28: mod_base = OTHER; note = 2'-O-methyl guanosine
  modified_base 29: mod_base = OTHER; note = 2'-O-methyl uridine
  modified_base 30: mod_base = OTHER; note = 2'-O-methyl adenosine
  modified_base 31: mod_base = OTHER; note = 2'-O-methyl guanosine
  modified_base 32: mod_base = OTHER; note = 2'-O-methyl cytidine
  modified_base 33: mod_base = OTHER; note = Deoxythymidine phosphorothioate
  modified_base 34: mod_base = OTHER; note = Deoxycytidine phosphorothioate
  modified_base 35: mod_base = OTHER; note = Deoxycytidine phosphorothioate
  modified_base 36: mod_base = OTHER; note = Deoxycytidine phosphorothioate
  modified_base 37: mod_base = OTHER; note = Deoxythymidine phosphorothioate
  modified_base 38: mod_base = OTHER; note = 2'-O-methyl uridine
  modified_base 39: mod_base = OTHER; note = 2'-O-methyl uridine
  modified_base 40: mod_base = OTHER; note = 2'-O-methyl cytidine
  modified_base 41: mod_base = OTHER; note = 2'-O-methyl uridine
  modified_base 42: mod_base = OTHER; note = 2'-O-methyl cytidine
  modified_base 43: mod_base = OTHER; note = 2'-O-methyl adenosine
  modified_base 44: mod_base = OTHER; note = 2'-O-methyl uridine
  modified_base 45: mod_base = OTHER; note = 2'-O-methyl uridine phosphorothioate
  modified_base 46: mod_base = OTHER; note = 2'-O-methyl uridine phosphorothioate
  modified_base 47: mod_base = OTHER; note = 2'-O-methyl cytidine phosphorothioate
  modified_base 48: mod_base = OTHER; note = 2'-O-methyl guanosine
  misc_feature 1..6: note = RNA
  misc_feature 7: note = DNA
  misc_feature 8..25: note = RNA
  misc_feature 26: note = DNA
  misc_feature 27..32: note = RNA
  misc_feature 33..37: note = DNA
  misc_feature 38..48: note = RNA

SEQ ID NO: 422 - RNA, 48 nt, synthetic construct
  source 1..48: mol_type = other RNA
  modified_base 1: mod_base = OTHER; note = 2'-O-methyl adenosine phosphorothioate
  modified_base 2: mod_base = OTHER; note = 2'-O-methyl guanosine phosphorothioate
  modified_base 3: mod_base = OTHER; note = 2'-O-methyl guanosine phosphorothioate
  modified_base 45: mod_base = OTHER; note = Uridine phosphorothioate
  modified_base 46: mod_base = OTHER; note = 2'-O-methyl uridine phosphorothioate
  modified_base 47: mod_base = OTHER; note = 2'-O-methyl cytidine phosphorothioate
  modified_base 48: mod_base = OTHER; note = 2'-O-methyl guanosine
aggcaaaggaggaagagtcgaagggttgtagctccctttctcatttcg

SEQ ID NO: 423 - RNA, 48 nt, synthetic construct; identical to SEQ ID NO: 422
  source 1..48: mol_type = other RNA
  modified_base 1: mod_base = OTHER; note = 2'-O-methyl adenosine phosphorothioate
  modified_base 2: mod_base = OTHER; note = 2'-O-methyl guanosine phosphorothioate
  modified_base 3: mod_base = OTHER; note = 2'-O-methyl guanosine phosphorothioate
  modified_base 4: mod_base = OTHER; note = 2'-O-methyl cytidine
  modified_base 5: mod_base = OTHER; note = 2'-O-methyl adenosine
  modified_base 9: mod_base = OTHER; note = 2'-O-methyl guanosine
  modified_base 10: mod_base = OTHER; note = 2'-O-methyl adenosine
  modified_base 11: mod_base = OTHER; note = 2'-O-methyl guanosine
  modified_base 13: mod_base = OTHER; note = 2'-O-methyl adenosine
  modified_base 18: mod_base = OTHER; note = 2'-O-methyl uridine
  modified_base 22: mod_base = OTHER; note = 2'-O-methyl adenosine
  modified_base 25: mod_base = OTHER; note = 2'-O-methyl guanosine
  modified_base 29: mod_base = OTHER; note = 2'-O-methyl uridine
  modified_base 30: mod_base = OTHER; note = 2'-O-methyl adenosine
  modified_base 31: mod_base = OTHER; note = 2'-O-methyl guanosine
  modified_base 32: mod_base = OTHER; note = 2'-O-methyl cytidine
  modified_base 38: mod_base = OTHER; note = 2'-O-methyl uridine
  modified_base 39: mod_base = OTHER; note = 2'-O-methyl uridine
  modified_base 40: mod_base = OTHER; note = 2'-O-methyl cytidine
  modified_base 41: mod_base = OTHER; note = 2'-O-methyl uridine
  modified_base 42: mod_base = OTHER; note = 2'-O-methyl cytidine
  modified_base 43: mod_base = OTHER; note = 2'-O-methyl adenosine
  modified_base 44: mod_base = OTHER; note = 2'-O-methyl uridine
  modified_base 45: mod_base = OTHER; note = 2'-O-methyl uridine phosphorothioate
  modified_base 46: mod_base = OTHER; note = 2'-O-methyl uridine phosphorothioate
  modified_base 47: mod_base = OTHER; note = 2'-O-methyl cytidine phosphorothioate
  modified_base 48: mod_base = OTHER; note = 2'-O-methyl guanosine

SEQ ID NO: 424 - DNA, 48 bp, synthetic construct
  source 1..48: mol_type = other DNA
  modified_base 1: mod_base = OTHER; note = 2'-O-methyl adenosine phosphorothioate
  modified_base 2: mod_base = OTHER; note = 2'-O-methyl guanosine phosphorothioate
  modified_base 3: mod_base = OTHER; note = 2'-O-methyl guanosine phosphorothioate
  modified_base 4: mod_base = OTHER; note = 2'-O-methyl cytidine
  modified_base 5: mod_base = OTHER; note = 2'-O-methyl adenosine
  modified_base 6: mod_base = OTHER; note = 2'-O-methyl adenosine
  modified_base 7: mod_base = OTHER; note = Deoxyadenosine phosphorothioate
  modified_base 8: mod_base = OTHER; note = 2'-O-methyl guanosine
  modified_base 9: mod_base = OTHER; note = 2'-O-methyl guanosine
  modified_base 10: mod_base = OTHER; note = 2'-O-methyl adenosine
  modified_base 11: mod_base = OTHER; note = 2'-O-methyl guanosine
  modified_base 12: mod_base = OTHER; note = 2'-fluoro guanosine
  modified_base 13: mod_base = OTHER; note = 2'-O-methyl adenosine
  modified_base 14: mod_base = OTHER; note = 2'-fluoro adenosine
  modified_base 15: mod_base = OTHER; note = 2'-O-methyl guanosine
  modified_base 16: mod_base = OTHER; note = 2'-fluoro adenosine
  modified_base 17: mod_base = OTHER; note = 2'-O-methyl guanosine
  modified_base 18: mod_base = OTHER; note = 2'-O-methyl uridine
  modified_base 19: mod_base = OTHER; note = 2'-O-methyl cytidine
  modified_base 20: mod_base = OTHER; note = 2'-O-methyl guanosine
  modified_base 21: mod_base = OTHER; note = 2'-fluoro adenosine
  modified_base 22: mod_base = OTHER; note = 2'-O-methyl adenosine
  modified_base 23: mod_base = OTHER; note = 2'-O-methyl guanosine
  modified_base 24: mod_base = OTHER; note = 2'-O-methyl guanosine
  modified_base 25: mod_base = OTHER; note = 2'-O-methyl guanosine
  modified_base 29: mod_base = OTHER; note = 2'-O-methyl uridine
  modified_base 30: mod_base = OTHER; note = 2'-O-methyl adenosine
  modified_base 31: mod_base = OTHER; note = 2'-O-methyl guanosine
  modified_base 32: mod_base = OTHER; note = 2'-O-methyl cytidine
  modified_base 38: mod_base = OTHER; note = 2'-O-methyl uridine
  modified_base 39: mod_base = OTHER; note = 2'-O-methyl uridine
  modified_base 40: mod_base = OTHER; note = 2'-O-methyl cytidine
  modified_base 41: mod_base = OTHER; note = 2'-O-methyl uridine
  modified_base 42: mod_base = OTHER; note = 2'-O-methyl cytidine
  modified_base 43: mod_base = OTHER; note = 2'-O-methyl adenosine
  modified_base 44: mod_base = OTHER; note = 2'-O-methyl uridine
  modified_base 45: mod_base = OTHER; note = 2'-O-methyl uridine phosphorothioate
  modified_base 46: mod_base = OTHER; note = 2'-O-methyl uridine phosphorothioate
  modified_base 47: mod_base = OTHER; note = 2'-O-methyl cytidine phosphorothioate
  modified_base 48: mod_base = OTHER; note = 2'-O-methyl guanosine
  misc_feature 1..6: note = RNA
  misc_feature 7: note = DNA
  misc_feature 8..48: note = RNA
aggcaaaggaggaagagtcgaagggttgtagctccctttctcatttcg

SEQ ID NO: 425 - DNA, 48 bp, synthetic construct; identical to SEQ ID NO: 424
  source 1..48: mol_type = other DNA
  modified_base 1: mod_base = OTHER; note = 2'-O-methyl adenosine phosphorothioate
  modified_base 2: mod_base = OTHER; note = 2'-O-methyl guanosine phosphorothioate
  modified_base 3: mod_base = OTHER; note = 2'-O-methyl guanosine phosphorothioate
  modified_base 4: mod_base = OTHER; note = 2'-O-methyl cytidine
  modified_base 5: mod_base = OTHER; note = 2'-O-methyl adenosine
  modified_base 6: mod_base = OTHER; note = 2'-O-methyl adenosine
  modified_base 7: mod_base = OTHER; note = Deoxyadenosine phosphorothioate
  modified_base 8: mod_base = OTHER; note = 2'-O-methyl guanosine
  modified_base 9: mod_base = OTHER; note = 2'-O-methyl guanosine
  modified_base 10: mod_base = OTHER; note = 2'-O-methyl adenosine
  modified_base 11: mod_base = OTHER; note = 2'-O-methyl guanosine
  modified_base 12: mod_base = OTHER; note = 2'-fluoro guanosine
  modified_base 13: mod_base = OTHER; note = 2'-O-methyl adenosine
  modified_base 14: mod_base = OTHER; note = 2'-fluoro adenosine
  modified_base 15: mod_base = OTHER; note = 2'-O-methyl guanosine
  modified_base 16: mod_base = OTHER; note = 2'-fluoro adenosine
  modified_base 17: mod_base = OTHER; note = 2'-O-methyl guanosine
  modified_base 18: mod_base = OTHER; note = 2'-O-methyl uridine
  modified_base 19: mod_base = OTHER; note = 2'-fluoro cytidine
  modified_base 20: mod_base = OTHER; note = 2'-O-methyl guanosine
  modified_base 21: mod_base = OTHER; note = 2'-fluoro adenosine
  modified_base 22: mod_base = OTHER; note = 2'-O-methyl adenosine
  modified_base 23: mod_base = OTHER; note = 2'-O-methyl guanosine
  modified_base 24: mod_base = OTHER; note = 2'-O-methyl guanosine
  modified_base 25: mod_base = OTHER; note = 2'-O-methyl guanosine
  modified_base 29: mod_base = OTHER; note = 2'-O-methyl uridine
  modified_base 30: mod_base = OTHER; note = 2'-O-methyl adenosine
  modified_base 31: mod_base = OTHER; note = 2'-O-methyl guanosine
  modified_base 32: mod_base = OTHER; note = 2'-O-methyl cytidine
  modified_base 38: mod_base = OTHER; note = 2'-O-methyl uridine
  modified_base 39: mod_base = OTHER; note = 2'-O-methyl uridine
  modified_base 40: mod_base = OTHER; note = 2'-O-methyl cytidine
  modified_base 41: mod_base = OTHER; note = 2'-O-methyl uridine
  modified_base 42: mod_base = OTHER; note = 2'-O-methyl cytidine
  modified_base 43: mod_base = OTHER; note = 2'-O-methyl adenosine
  modified_base 44: mod_base = OTHER; note = 2'-O-methyl uridine
  modified_base 45: mod_base = OTHER; note = 2'-O-methyl uridine phosphorothioate
  modified_base 46: mod_base = OTHER; note = 2'-O-methyl uridine phosphorothioate
  modified_base 47: mod_base = OTHER; note = 2'-O-methyl cytidine phosphorothioate
  modified_base 48: mod_base = OTHER; note = 2'-O-methyl guanosine
  misc_feature 1..6: note = RNA
  misc_feature 7: note = DNA
  misc_feature 8..48: note = RNA

SEQ ID NO: 426 - DNA, 48 bp, synthetic construct; identical to SEQ ID NO: 424
  source 1..48: mol_type = other DNA
  modified_base 1: mod_base = OTHER; note = 2'-O-methyl adenosine phosphorothioate
  modified_base 2: mod_base = OTHER; note = 2'-O-methyl guanosine phosphorothioate
  modified_base 3: mod_base = OTHER; note = 2'-O-methyl guanosine phosphorothioate
  modified_base 4: mod_base = OTHER; note = 2'-O-methyl cytidine
  modified_base 5: mod_base = OTHER; note = 2'-O-methyl adenosine
  modified_base 6: mod_base = OTHER; note = 2'-O-methyl adenosine
  modified_base 7: mod_base = OTHER; note = Deoxyadenosine phosphorothioate
  modified_base 8: mod_base = OTHER; note = 2'-O-methyl guanosine
  modified_base 9: mod_base = OTHER; note = 2'-O-methyl guanosine
  modified_base 10: mod_base = OTHER; note = 2'-O-methyl adenosine
  modified_base 11: mod_base = OTHER; note = 2'-O-methyl guanosine
  modified_base 12: mod_base = OTHER; note = 2'-fluoro guanosine
  modified_base 13: mod_base = OTHER; note = 2'-O-methyl adenosine
  modified_base 14: mod_base = OTHER; note = 2'-fluoro adenosine
  modified_base 15: mod_base = OTHER; note = 2'-O-methyl guanosine
  modified_base 16: mod_base = OTHER; note = 2'-fluoro adenosine
  modified_base 17: mod_base = OTHER; note = 2'-O-methyl guanosine
  modified_base 18: mod_base = OTHER; note = 2'-O-methyl uridine
  modified_base 19: mod_base = OTHER; note = 2'-O-methyl cytidine
  modified_base 20: mod_base = OTHER; note = 2'-O-methyl guanosine
  modified_base 21: mod_base = OTHER; note = 2'-fluoro adenosine
  modified_base 22: mod_base = OTHER; note = 2'-O-methyl adenosine
  modified_base 23: mod_base = OTHER; note = 2'-O-methyl guanosine
  modified_base 24: mod_base = OTHER; note = 2'-O-methyl guanosine
  modified_base 25: mod_base = OTHER; note = 2'-O-methyl guanosine
  modified_base 28: mod_base = OTHER; note = 2'-O-methyl guanosine
  modified_base 29: mod_base = OTHER; note = 2'-O-methyl uridine
  modified_base 30: mod_base = OTHER; note = 2'-O-methyl adenosine
  modified_base 31: mod_base = OTHER; note = 2'-O-methyl guanosine
  modified_base 32: mod_base = OTHER; note = 2'-O-methyl cytidine
  modified_base 35: mod_base = OTHER; note = Deoxycytidine phosphorothioate
  modified_base 36: mod_base = OTHER; note = Deoxycytidine phosphorothioate
  modified_base 37: mod_base = OTHER; note = Deoxythymidine phosphorothioate
  modified_base 38: mod_base = OTHER; note = 2'-O-methyl uridine
  modified_base 39: mod_base = OTHER; note = 2'-O-methyl uridine
  modified_base 40: mod_base = OTHER; note = 2'-O-methyl cytidine
  modified_base 41: mod_base = OTHER; note = 2'-O-methyl uridine
  modified_base 42: mod_base = OTHER; note = 2'-O-methyl cytidine
  modified_base 43: mod_base = OTHER; note = 2'-O-methyl adenosine
  modified_base 44: mod_base = OTHER; note = 2'-O-methyl uridine
  modified_base 45: mod_base = OTHER; note = 2'-O-methyl uridine phosphorothioate
  modified_base 46: mod_base = OTHER; note = 2'-O-methyl uridine phosphorothioate
  modified_base 47: mod_base = OTHER; note = 2'-O-methyl cytidine phosphorothioate
  modified_base 48: mod_base = OTHER; note = 2'-O-methyl guanosine
  misc_feature 1..6: note = RNA
  misc_feature 7: note = DNA
  misc_feature 8..34: note = RNA
  misc_feature 35..37: note = DNA
  misc_feature 38..48: note = RNA

SEQ ID NO: 427 - DNA, 48 bp, synthetic construct; identical to SEQ ID NO: 424
  source 1..48: mol_type = other DNA
  modified_base 1: mod_base = OTHER; note = 2'-O-methyl adenosine phosphorothioate
  modified_base 2: mod_base = OTHER; note = 2'-O-methyl guanosine phosphorothioate
  modified_base 3: mod_base = OTHER; note = 2'-O-methyl guanosine phosphorothioate
  modified_base 4: mod_base = OTHER; note = 2'-O-methyl cytidine
  modified_base 5: mod_base = OTHER; note = 2'-O-methyl adenosine
  modified_base 6: mod_base = OTHER; note = 2'-O-methyl adenosine
  modified_base 7: mod_base = OTHER; note = Deoxyadenosine phosphorothioate
  modified_base 8: mod_base = OTHER; note = 2'-O-methyl guanosine
  modified_base 9: mod_base = OTHER; note = 2'-O-methyl guanosine
  modified_base 10: mod_base = OTHER; note = 2'-O-methyl adenosine
  modified_base 11: mod_base = OTHER; note = 2'-O-methyl guanosine
  modified_base 12: mod_base = OTHER; note = 2'-fluoro guanosine
  modified_base 13: mod_base = OTHER; note = 2'-O-methyl adenosine
  modified_base 14: mod_base = OTHER; note = 2'-fluoro adenosine
  modified_base 15: mod_base = OTHER; note = 2'-O-methyl guanosine
  modified_base 16: mod_base = OTHER; note = 2'-fluoro adenosine
  modified_base 17: mod_base = OTHER; note = 2'-O-methyl guanosine
  modified_base 18: mod_base = OTHER; note = 2'-O-methyl uridine
  modified_base 19: mod_base = OTHER; note = 2'-O-methyl cytidine
  modified_base 20: mod_base = OTHER; note = 2'-O-methyl guanosine
  modified_base 21: mod_base = OTHER; note = 2'-fluoro adenosine
  modified_base 22: mod_base = OTHER; note = 2'-O-methyl adenosine
  modified_base 23: mod_base = OTHER; note = 2'-O-methyl guanosine
  modified_base 24: mod_base = OTHER; note = 2'-O-methyl guanosine
  modified_base 25: mod_base = OTHER; note = 2'-O-methyl guanosine
  modified_base 28: mod_base = OTHER; note = 2'-O-methyl guanosine
  modified_base 29: mod_base = OTHER; note = 2'-O-methyl uridine
  modified_base 30: mod_base = OTHER; note = 2'-O-methyl adenosine
  modified_base 31: mod_base = OTHER; note = 2'-O-methyl guanosine
  modified_base 32: mod_base = OTHER; note = 2'-O-methyl cytidine
  modified_base 33: mod_base = OTHER; note = Deoxythymidine phosphorothioate
  modified_base 35: mod_base = OTHER; note = Deoxycytidine phosphorothioate
  modified_base 37: mod_base = OTHER; note = Deoxythymidine phosphorothioate
  modified_base 38: mod_base = OTHER; note = 2'-O-methyl uridine
  modified_base 39: mod_base = OTHER; note = 2'-O-methyl uridine
  modified_base 40: mod_base = OTHER; note = 2'-O-methyl cytidine
  modified_base 41: mod_base = OTHER; note = 2'-O-methyl uridine
  modified_base 42: mod_base = OTHER; note = 2'-O-methyl cytidine
  modified_base 43: mod_base = OTHER; note = 2'-O-methyl adenosine
  modified_base 44: mod_base = OTHER; note = 2'-O-methyl uridine
  modified_base 45: mod_base = OTHER; note = 2'-O-methyl uridine phosphorothioate
  modified_base 46: mod_base = OTHER; note = 2'-O-methyl uridine phosphorothioate
  modified_base 47: mod_base = OTHER; note = 2'-O-methyl cytidine phosphorothioate
  modified_base 48: mod_base = OTHER; note = 2'-O-methyl guanosine
  misc_feature 1..6: note = RNA
  misc_feature 7: note = DNA
  misc_feature 8..32: note = RNA
  misc_feature 33: note = DNA
  misc_feature 34: note = RNA
  misc_feature 35: note = DNA
  misc_feature 36: note = RNA
  misc_feature 37: note = DNA
  misc_feature 38..48: note = RNA

SEQ ID NO: 428 - DNA, 48 bp, synthetic construct; identical to SEQ ID NO: 424
  source 1..48: mol_type = other DNA
  modified_base 1: mod_base = OTHER; note = 2'-O-methyl adenosine phosphorothioate
  modified_base 2: mod_base = OTHER; note = 2'-O-methyl guanosine phosphorothioate
  modified_base 3: mod_base = OTHER; note = 2'-O-methyl guanosine phosphorothioate
  modified_base 4: mod_base = OTHER; note = 2'-O-methyl cytidine
  modified_base 5: mod_base = OTHER; note = 2'-O-methyl adenosine
  modified_base 6: mod_base = OTHER; note = 2'-O-methyl adenosine
  modified_base 7: mod_base = OTHER; note = Deoxyadenosine phosphorothioate
  modified_base 8: mod_base = OTHER; note = 2'-O-methyl guanosine
  modified_base 9: mod_base = OTHER; note = 2'-O-methyl guanosine
  modified_base 10: mod_base = OTHER; note = 2'-O-methyl adenosine
  modified_base 11: mod_base = OTHER; note = 2'-O-methyl guanosine
  modified_base 12: mod_base = OTHER; note = 2'-fluoro guanosine
  modified_base 13: mod_base = OTHER; note = 2'-O-methyl adenosine
  modified_base 14: mod_base = OTHER; note = 2'-fluoro adenosine
  modified_base 15: mod_base = OTHER; note = 2'-O-methyl guanosine
  modified_base 16: mod_base = OTHER; note = 2'-fluoro adenosine
  modified_base 17: mod_base = OTHER; note = 2'-O-methyl guanosine
  modified_base 18: mod_base = OTHER; note = 2'-O-methyl uridine
  modified_base 19: mod_base = OTHER; note = 2'-O-methyl cytidine
  modified_base 20: mod_base = OTHER; note = 2'-O-methyl guanosine
  modified_base 21: mod_base = OTHER; note = 2'-fluoro adenosine
  modified_base 22: mod_base = OTHER; note = 2'-O-methyl adenosine
  modified_base 23: mod_base = OTHER; note = 2'-O-methyl guanosine
  modified_base 24: mod_base = OTHER; note = 2'-O-methyl guanosine
  modified_base 25: mod_base = OTHER; note = 2'-O-methyl guanosine
  modified_base 26: mod_base = OTHER; note = Deoxythymidine phosphorothioate
  modified_base 28: mod_base = OTHER; note = 2'-O-methyl guanosine
  modified_base 29: mod_base = OTHER; note = 2'-O-methyl uridine
  modified_base 30: mod_base = OTHER; note = 2'-O-methyl adenosine
  modified_base 31: mod_base = OTHER; note = 2'-O-methyl guanosine
  modified_base 32: mod_base = OTHER; note = 2'-O-methyl cytidine
  modified_base 33: mod_base = OTHER; note = Deoxythymidine phosphorothioate
  modified_base 35: mod_base = OTHER; note = Deoxycytidine phosphorothioate
  modified_base 36: mod_base = OTHER; note = Deoxycytidine phosphorothioate
  modified_base 37: mod_base = OTHER; note = Deoxythymidine phosphorothioate
  modified_base 38: mod_base = OTHER; note = 2'-O-methyl uridine
  modified_base 39: mod_base = OTHER; note = 2'-O-methyl uridine
  modified_base 40: mod_base = OTHER; note = 2'-O-methyl cytidine
  modified_base 41: mod_base = OTHER; note = 2'-O-methyl uridine
  modified_base 42: mod_base = OTHER; note = 2'-O-methyl cytidine
  modified_base 43: mod_base = OTHER; note = 2'-O-methyl adenosine
  modified_base 44: mod_base = OTHER; note = 2'-O-methyl uridine
  modified_base 45: mod_base = OTHER; note = 2'-O-methyl uridine phosphorothioate
  modified_base 46: mod_base = OTHER; note = 2'-O-methyl uridine phosphorothioate
  modified_base 47: mod_base = OTHER; note = 2'-O-methyl cytidine phosphorothioate
  modified_base 48: mod_base = OTHER; note = 2'-O-methyl guanosine
  misc_feature 1..6: note = RNA
  misc_feature 7: note = DNA
  misc_feature 8..25: note = RNA
  misc_feature 26: note = DNA
  misc_feature 27..32: note = RNA
  misc_feature 33: note = DNA
  misc_feature 34: note = RNA
  misc_feature 35..37: note = DNA
  misc_feature 38..48: note = RNA

SEQ ID NO: 429 - RNA, 48 nt, synthetic construct
  source 1..48: mol_type = other RNA
  modified_base 1: mod_base = OTHER; note = 2'-O-methyl guanosine phosphorothioate
  modified_base 2: mod_base = OTHER; note = 2'-O-methyl guanosine phosphorothioate
  modified_base 3: mod_base = OTHER; note = 2'-O-methyl guanosine phosphorothioate
  modified_base 45: mod_base = OTHER; note = Uridine phosphorothioate
  modified_base 46: mod_base = OTHER; note = 2'-O-methyl uridine phosphorothioate
  modified_base 47: mod_base = OTHER; note = 2'-O-methyl cytidine phosphorothioate
  modified_base 48: mod_base = OTHER; note = 2'-O-methyl guanosine
ggggccagcttcagacacaaatacgttgtagctccctttctcatttcg

SEQ ID NO: 430 - RNA, 48 nt, synthetic construct; identical to SEQ ID NO: 429
  source 1..48: mol_type = other RNA
  modified_base 1: mod_base = OTHER; note = 2'-O-methyl guanosine phosphorothioate
  modified_base 2: mod_base = OTHER; note = 2'-O-methyl guanosine phosphorothioate
  modified_base 3: mod_base = OTHER; note = 2'-O-methyl guanosine phosphorothioate
  modified_base 4: mod_base = OTHER; note = 2'-O-methyl guanosine
  modified_base 5: mod_base = OTHER; note = 2'-O-methyl cytidine
  modified_base 9: mod_base = OTHER; note = 2'-O-methyl cytidine
  modified_base 10: mod_base = OTHER; note = 2'-O-methyl uridine
  modified_base 11: mod_base = OTHER; note = 2'-O-methyl uridine
  modified_base 13: mod_base = OTHER; note = 2'-O-methyl adenosine
  modified_base 15: mod_base = OTHER; note = 2'-O-methyl adenosine
  modified_base 18: mod_base = OTHER; note = 2'-O-methyl cytidine
  modified_base 22: mod_base = OTHER; note = 2'-O-methyl uridine
  modified_base 25: mod_base = OTHER; note = 2'-O-methyl guanosine
  modified_base 29: mod_base = OTHER; note = 2'-O-methyl uridine
  modified_base 30: mod_base = OTHER; note = 2'-O-methyl adenosine
  modified_base 31: mod_base = OTHER; note = 2'-O-methyl guanosine
  modified_base 32: mod_base = OTHER; note = 2'-O-methyl cytidine
  modified_base 38: mod_base = OTHER; note = 2'-O-methyl uridine
  modified_base 39: mod_base = OTHER; note = 2'-O-methyl uridine
  modified_base 40: mod_base = OTHER; note = 2'-O-methyl cytidine
  modified_base 41: mod_base = OTHER; note = 2'-O-methyl uridine
  modified_base 42: mod_base = OTHER; note = 2'-O-methyl cytidine
  modified_base 43: mod_base = OTHER; note = 2'-O-methyl adenosine
  modified_base 44: mod_base = OTHER; note = 2'-O-methyl uridine
  modified_base 45: mod_base = OTHER; note = 2'-O-methyl uridine phosphorothioate
  modified_base 46: mod_base = OTHER; note = 2'-O-methyl uridine phosphorothioate
  modified_base 47: mod_base = OTHER; note = 2'-O-methyl cytidine phosphorothioate
  modified_base 48: mod_base = OTHER; note = 2'-O-methyl guanosine

SEQ ID NO: 431 - DNA, 48 bp, synthetic construct
  source 1..48: mol_type = other DNA
  modified_base 1: mod_base = OTHER; note = 2'-O-methyl guanosine phosphorothioate
  modified_base 2: mod_base = OTHER; note = 2'-O-methyl guanosine phosphorothioate
  modified_base 3: mod_base = OTHER; note = 2'-O-methyl guanosine phosphorothioate
  modified_base 4: mod_base = OTHER; note = 2'-O-methyl guanosine
  modified_base 5: mod_base = OTHER; note = 2'-O-methyl cytidine
  modified_base 6: mod_base = OTHER; note = 2'-O-methyl cytidine
  modified_base 7: mod_base = OTHER; note = Deoxyadenosine phosphorothioate
  modified_base 8: mod_base = OTHER; note = 2'-O-methyl guanosine
  modified_base 9: mod_base = OTHER; note = 2'-O-methyl cytidine
  modified_base 10: mod_base = OTHER; note = 2'-O-methyl uridine
  modified_base 11: mod_base = OTHER; note = 2'-O-methyl uridine
  modified_base 12: mod_base = OTHER; note = 2'-fluoro cytidine
  modified_base 13: mod_base = OTHER; note = 2'-O-methyl adenosine
  modified_base 14: mod_base = OTHER; note = 2'-fluoro guanosine
  modified_base 15: mod_base = OTHER; note = 2'-O-methyl adenosine
  modified_base 16: mod_base = OTHER; note = 2'-O-methyl cytidine
  modified_base 17: mod_base = OTHER; note = 2'-O-methyl adenosine
  modified_base 18: mod_base = OTHER; note = 2'-O-methyl cytidine
  modified_base 19: mod_base = OTHER; note = 2'-O-methyl adenosine
  modified_base 20: mod_base = OTHER; note = 2'-O-methyl adenosine
  modified_base 21: mod_base = OTHER; note = 2'-fluoro adenosine
  modified_base 22: mod_base = OTHER; note = 2'-O-methyl uridine
  modified_base 23: mod_base = OTHER; note = 2'-O-methyl adenosine
  modified_base 24: mod_base = OTHER; note = 2'-O-methyl cytidine
  modified_base 25: mod_base = OTHER; note = 2'-O-methyl guanosine
  modified_base 29: mod_base = OTHER; note = 2'-O-methyl uridine
  modified_base 30: mod_base = OTHER; note = 2'-O-methyl adenosine
  modified_base 31: mod_base = OTHER; note = 2'-O-methyl guanosine
  modified_base 32: mod_base = OTHER; note = 2'-O-methyl cytidine
  modified_base 38: mod_base = OTHER; note = 2'-O-methyl uridine
  modified_base 39: mod_base = OTHER; note = 2'-O-methyl uridine
  modified_base 40: mod_base = OTHER; note = 2'-O-methyl cytidine
  modified_base 41: mod_base = OTHER; note = 2'-O-methyl uridine
  modified_base 42: mod_base = OTHER; note = 2'-O-methyl cytidine
  modified_base 43: mod_base = OTHER; note = 2'-O-methyl adenosine
  modified_base 44: mod_base = OTHER; note = 2'-O-methyl uridine
  modified_base 45: mod_base = OTHER; note = 2'-O-methyl uridine phosphorothioate
  modified_base 46: mod_base = OTHER; note = 2'-O-methyl uridine phosphorothioate
  modified_base 47: mod_base = OTHER; note = 2'-O-methyl cytidine phosphorothioate
  modified_base 48: mod_base = OTHER; note = 2'-O-methyl guanosine
  misc_feature 1..6: note = RNA
  misc_feature 7: note = DNA
  misc_feature 8..48: note = RNA
ggggccagcttcagacacaaatacgttgtagctccctttctcatttcg

SEQ ID NO: 432 - DNA, 48 bp, synthetic construct; identical to SEQ ID NO: 431
  source 1..48: mol_type = other DNA
  modified_base 1: mod_base = OTHER; note = 2'-O-methyl guanosine phosphorothioate
  modified_base 2: mod_base = OTHER; note = 2'-O-methyl guanosine phosphorothioate
  modified_base 3: mod_base = OTHER; note = 2'-O-methyl guanosine phosphorothioate
  modified_base 4: mod_base = OTHER; note = 2'-O-methyl guanosine
  modified_base 5: mod_base = OTHER; note = 2'-O-methyl cytidine
  modified_base 6: mod_base = OTHER; note = 2'-O-methyl cytidine
  modified_base 7: mod_base = OTHER; note = Deoxyadenosine phosphorothioate
  modified_base 8: mod_base = OTHER; note = 2'-O-methyl guanosine
  modified_base 9: mod_base = OTHER; note = 2'-O-methyl cytidine
  modified_base 10: mod_base = OTHER; note = 2'-O-methyl uridine
  modified_base 11: mod_base = OTHER; note = 2'-O-methyl uridine
  modified_base 12: mod_base = OTHER; note = 2'-fluoro cytidine
  modified_base 13: mod_base = OTHER; note = 2'-O-methyl adenosine
  modified_base 14: mod_base = OTHER; note = 2'-fluoro guanosine
  modified_base 15: mod_base = OTHER; note = 2'-O-methyl adenosine
  modified_base 16: mod_base = OTHER; note = 2'-O-methyl cytidine
  modified_base 17: mod_base = OTHER; note = 2'-O-methyl adenosine
  modified_base 18: mod_base = OTHER; note = 2'-O-methyl cytidine
  modified_base 19: mod_base = OTHER; note = 2'-fluoro adenosine
  modified_base 20: mod_base = OTHER; note = 2'-O-methyl adenosine
  modified_base 21: mod_base = OTHER; note = 2'-fluoro adenosine
  modified_base 22: mod_base = OTHER; note = 2'-O-methyl uridine
  modified_base 23: mod_base = OTHER; note = 2'-O-methyl adenosine
  modified_base 24: mod_base = OTHER; note = 2'-O-methyl cytidine
  modified_base 25: mod_base = OTHER; note = 2'-O-methyl guanosine
  modified_base 29: mod_base = OTHER; note = 2'-O-methyl uridine
  modified_base 30: mod_base = OTHER; note = 2'-O-methyl adenosine
  modified_base 31: mod_base = OTHER; note = 2'-O-methyl guanosine
  modified_base 32: mod_base = OTHER; note = 2'-O-methyl cytidine
  modified_base 38: mod_base = OTHER; note = 2'-O-methyl uridine
  modified_base 39: mod_base = OTHER; note = 2'-O-methyl uridine
  modified_base 40: mod_base = OTHER; note = 2'-O-methyl cytidine
  modified_base 41: mod_base = OTHER; note = 2'-O-methyl uridine
  modified_base 42: mod_base = OTHER; note = 2'-O-methyl cytidine
  modified_base 43: mod_base = OTHER; note = 2'-O-methyl adenosine
  modified_base 44: mod_base = OTHER; note = 2'-O-methyl uridine
  modified_base 45: mod_base = OTHER; note = 2'-O-methyl uridine phosphorothioate
  modified_base 46: mod_base = OTHER; note = 2'-O-methyl uridine phosphorothioate
  modified_base 47: mod_base = OTHER; note = 2'-O-methyl cytidine phosphorothioate
  modified_base 48: mod_base = OTHER; note = 2'-O-methyl guanosine
  misc_feature 1..6: note = RNA
  misc_feature 7: note = DNA
  misc_feature 8..48: note = RNA

SEQ ID NO: 433 - DNA, 48 bp, synthetic construct; identical to SEQ ID NO: 431
  source 1..48: mol_type = other DNA
  modified_base 1: mod_base = OTHER; note = 2'-O-methyl guanosine phosphorothioate
  modified_base 2: mod_base = OTHER; note = 2'-O-methyl guanosine phosphorothioate
  modified_base 3: mod_base = OTHER; note = 2'-O-methyl guanosine phosphorothioate
  modified_base 4: mod_base = OTHER; note = 2'-O-methyl guanosine
  modified_base 5: mod_base = OTHER; note = 2'-O-methyl cytidine
  modified_base 6: mod_base = OTHER; note = 2'-O-methyl cytidine
  modified_base 7: mod_base = OTHER; note = Deoxyadenosine phosphorothioate
  modified_base 8: mod_base = OTHER; note = 2'-O-methyl guanosine
  modified_base 9: mod_base = OTHER; note = 2'-O-methyl cytidine
  modified_base 10: mod_base = OTHER; note = 2'-O-methyl uridine
  modified_base 11: mod_base = OTHER; note = 2'-O-methyl uridine
  modified_base 12: mod_base = OTHER; note = 2'-fluoro cytidine
  modified_base 13: mod_base = OTHER; note = 2'-O-methyl adenosine
  modified_base 14: mod_base = OTHER; note = 2'-fluoro guanosine
  modified_base 15: mod_base = OTHER; note = 2'-O-methyl adenosine
  modified_base 16: mod_base = OTHER; note = 2'-O-methyl cytidine
  modified_base 17: mod_base = OTHER; note = 2'-O-methyl adenosine
  modified_base 18: mod_base = OTHER; note = 2'-O-methyl cytidine
  modified_base 19: mod_base = OTHER; note = 2'-O-methyl adenosine
  modified_base 20: mod_base = OTHER; note = 2'-O-methyl adenosine
  modified_base 21: mod_base = OTHER; note = 2'-fluoro adenosine
  modified_base 22: mod_base = OTHER; note = 2'-O-methyl uridine
  modified_base 23: mod_base = OTHER; note = 2'-O-methyl adenosine
  modified_base 24: mod_base = OTHER; note = 2'-O-methyl cytidine
  modified_base 25: mod_base = OTHER; note = 2'-O-methyl guanosine
  modified_base 28: mod_base = OTHER; note = 2'-O-methyl guanosine
  modified_base 29: mod_base = OTHER; note = 2'-O-methyl uridine
  modified_base 30: mod_base = OTHER; note = 2'-O-methyl adenosine
  modified_base 31: mod_base = OTHER; note = 2'-O-methyl guanosine
  modified_base 32: mod_base = OTHER; note = 2'-O-methyl cytidine
  modified_base 35: mod_base = OTHER; note = Deoxycytidine phosphorothioate
  modified_base 36: mod_base = OTHER; note = Deoxycytidine phosphorothioate
  modified_base 37: mod_base = OTHER; note = Deoxythymidine phosphorothioate
  modified_base 38: mod_base = OTHER; note = 2'-O-methyl uridine
  modified_base 39: mod_base = OTHER; note = 2'-O-methyl uridine
  modified_base 40: mod_base = OTHER; note = 2'-O-methyl cytidine
  modified_base 41: mod_base = OTHER; note = 2'-O-methyl uridine
  modified_base 42: mod_base = OTHER; note = 2'-O-methyl cytidine
  modified_base 43: mod_base = OTHER; note = 2'-O-methyl adenosine
  modified_base 44: mod_base = OTHER; note = 2'-O-methyl uridine
  modified_base 45: mod_base = OTHER; note = 2'-O-methyl uridine phosphorothioate
  modified_base 46: mod_base = OTHER; note = 2'-O-methyl uridine phosphorothioate
  modified_base 47: mod_base = OTHER; note = 2'-O-methyl cytidine phosphorothioate
  modified_base 48: mod_base = OTHER; note = 2'-O-methyl guanosine
  misc_feature 1..6: note = RNA
  misc_feature 7: note = DNA
  misc_feature 8..34: note = RNA
  misc_feature 35..37: note = DNA
  misc_feature 38..48: note = RNA

SEQ ID NO: 434 - DNA, 48 bp, synthetic construct; identical to SEQ ID NO: 431
  source 1..48: mol_type = other DNA
  modified_base 1: mod_base = OTHER; note = 2'-O-methyl guanosine phosphorothioate
  modified_base 2: mod_base = OTHER; note = 2'-O-methyl guanosine phosphorothioate
  modified_base 3: mod_base = OTHER; note = 2'-O-methyl guanosine phosphorothioate
  modified_base 4: mod_base = OTHER; note = 2'-O-methyl guanosine
  modified_base 5: mod_base = OTHER; note = 2'-O-methyl cytidine
  modified_base 6: mod_base = OTHER; note = 2'-O-methyl cytidine
  modified_base 7: mod_base = OTHER; note = Deoxyadenosine phosphorothioate
  modified_base 8: mod_base = OTHER; note = 2'-O-methyl guanosine
  modified_base 9: mod_base = OTHER; note = 2'-O-methyl cytidine
  modified_base 10: mod_base = OTHER; note = 2'-O-methyl uridine
  modified_base 11: mod_base = OTHER; note = 2'-O-methyl uridine
  modified_base 12: mod_base = OTHER; note = 2'-fluoro cytidine
  modified_base 13: mod_base = OTHER; note = 2'-O-methyl adenosine
  modified_base 14: mod_base = OTHER; note = 2'-fluoro guanosine
  modified_base 15: mod_base = OTHER; note = 2'-O-methyl adenosine
  modified_base 16: mod_base = OTHER; note = 2'-O-methyl cytidine
  modified_base 17: mod_base = OTHER; note = 2'-O-methyl adenosine
  modified_base 18: mod_base = OTHER; note = 2'-O-methyl cytidine
  modified_base 19: mod_base = OTHER; note = 2'-O-methyl adenosine
  modified_base 20: mod_base = OTHER; note = 2'-O-methyl adenosine
  modified_base 21: mod_base = OTHER; note = 2'-fluoro adenosine
  modified_base 22: mod_base = OTHER; note = 2'-O-methyl uridine
  modified_base 23: mod_base = OTHER; note = 2'-O-methyl adenosine
  modified_base 24: mod_base = OTHER; note = 2'-O-methyl cytidine
  modified_base 25: mod_base = OTHER; note = 2'-O-methyl guanosine
  modified_base 28: mod_base = OTHER; note = 2'-O-methyl guanosine
  modified_base 29: mod_base = OTHER; note = 2'-O-methyl uridine
  modified_base 30: mod_base = OTHER; note = 2'-O-methyl adenosine
  modified_base 31: mod_base = OTHER; note = 2'-O-methyl guanosine
  modified_base 32: mod_base = OTHER; note = 2'-O-methyl cytidine
  modified_base 33: mod_base = OTHER; note = Deoxythymidine phosphorothioate
  modified_base 35: mod_base = OTHER; note = Deoxycytidine phosphorothioate
  modified_base 37: mod_base = OTHER; note = Deoxythymidine phosphorothioate
  modified_base 38: mod_base = OTHER; note = 2'-O-methyl uridine
  modified_base 39: mod_base = OTHER; note = 2'-O-methyl uridine
  modified_base 40: mod_base = OTHER; note = 2'-O-methyl cytidine
  modified_base 41: mod_base = OTHER; note = 2'-O-methyl uridine
  modified_base 42: mod_base = OTHER; note = 2'-O-methyl cytidine
  modified_base 43: mod_base = OTHER; note = 2'-O-methyl adenosine
  modified_base 44: mod_base = OTHER; note = 2'-O-methyl uridine
  modified_base 45: mod_base = OTHER; note = 2'-O-methyl uridine phosphorothioate
  modified_base 46: mod_base = OTHER; note = 2'-O-methyl uridine phosphorothioate
  modified_base 47: mod_base = OTHER; note = 2'-O-methyl cytidine phosphorothioate
  modified_base 48: mod_base = OTHER; note = 2'-O-methyl guanosine
  misc_feature 1..6: note = RNA
  misc_feature 7: note = DNA
  misc_feature 8..32: note = RNA
  misc_feature 33: note = DNA
  misc_feature 34: note = RNA
  misc_feature 35: note = DNA
  misc_feature 36: note = RNA
  misc_feature 37: note = DNA
  misc_feature 38..48: note = RNA

SEQ ID NO: 435 - DNA, 48 bp, synthetic construct; identical to SEQ ID NO: 431
  source 1..48: mol_type = other DNA
  modified_base 1: mod_base = OTHER; note = 2'-O-methyl guanosine phosphorothioate
  modified_base 2: mod_base = OTHER; note = 2'-O-methyl guanosine phosphorothioate
  modified_base 3: mod_base = OTHER; note = 2'-O-methyl guanosine phosphorothioate
  modified_base 4: mod_base = OTHER; note = 2'-O-methyl guanosine
  modified_base 5: mod_base = OTHER; note = 2'-O-methyl cytidine
  modified_base 6: mod_base = OTHER; note = 2'-O-methyl cytidine
  modified_base 7: mod_base = OTHER; note = Deoxyadenosine phosphorothioate
  modified_base 8: mod_base = OTHER; note = 2'-O-methyl guanosine
  modified_base 9: mod_base = OTHER; note = 2'-O-methyl cytidine
  modified_base 10: mod_base = OTHER; note = 2'-O-methyl uridine
  modified_base 11: mod_base = OTHER; note = 2'-O-methyl uridine
  modified_base 12: mod_base = OTHER; note = 2'-fluoro cytidine
  modified_base 13: mod_base = OTHER; note = 2'-O-methyl adenosine
  modified_base 14: mod_base = OTHER; note = 2'-fluoro guanosine
  modified_base 15: mod_base = OTHER; note = 2'-O-methyl adenosine
  modified_base 16: mod_base = OTHER; note = 2'-O-methyl cytidine
  modified_base 17: mod_base = OTHER; note = 2'-O-methyl adenosine
  modified_base 18: mod_base = OTHER; note = 2'-O-methyl cytidine
  modified_base 19: mod_base = OTHER; note = 2'-O-methyl adenosine
  modified_base 20: mod_base = OTHER; note = 2'-O-methyl adenosine
  modified_base 21: mod_base = OTHER; note = 2'-fluoro adenosine
  modified_base 22: mod_base = OTHER; note = 2'-O-methyl uridine
  modified_base 23: mod_base = OTHER; note = 2'-O-methyl adenosine
  modified_base 24: mod_base = OTHER; note = 2'-O-methyl cytidine
  modified_base 25: mod_base = OTHER; note = 2'-O-methyl guanosine
  modified_base 26: mod_base = OTHER; note = Deoxythymidine phosphorothioate
  modified_base 28: mod_base = OTHER; note = 2'-O-methyl guanosine
  modified_base 29: mod_base = OTHER; note = 2'-O-methyl uridine
  modified_base 30: mod_base = OTHER; note = 2'-O-methyl adenosine
  modified_base 31: mod_base = OTHER; note = 2'-O-methyl guanosine
  modified_base 32: mod_base = OTHER; note = 2'-O-methyl cytidine
  modified_base 33: mod_base = OTHER; note = Deoxythymidine phosphorothioate
  modified_base 35: mod_base = OTHER; note = Deoxycytidine phosphorothioate
  modified_base 36: mod_base = OTHER; note = Deoxycytidine phosphorothioate
  modified_base 37: mod_base = OTHER; note = Deoxythymidine phosphorothioate
  modified_base 38: mod_base = OTHER; note = 2'-O-methyl uridine
  modified_base 39: mod_base = OTHER; note = 2'-O-methyl uridine
  modified_base 40: mod_base = OTHER; note = 2'-O-methyl cytidine
  modified_base 41: mod_base = OTHER; note = 2'-O-methyl uridine
  modified_base 42: mod_base = OTHER; note = 2'-O-methyl cytidine
  modified_base 43: mod_base = OTHER; note = 2'-O-methyl adenosine
  modified_base 44: mod_base = OTHER; note = 2'-O-methyl uridine
  modified_base 45: mod_base = OTHER; note = 2'-O-methyl uridine phosphorothioate
  modified_base 46: mod_base = OTHER; note = 2'-O-methyl uridine phosphorothioate
  modified_base 47: mod_base = OTHER; note = 2'-O-methyl cytidine phosphorothioate
  modified_base 48: mod_base = OTHER; note = 2'-O-methyl guanosine
  misc_feature 1..6: note = RNA
  misc_feature 7: note = DNA
  misc_feature 8..25: note = RNA
  misc_feature 26: note = DNA
  misc_feature 27..32: note = RNA
  misc_feature 33: note = DNA
  misc_feature 34: note = RNA
  misc_feature 35..37: note = DNA
  misc_feature 38..48: note = RNA

SEQ ID NO: 436 - RNA, 103 nt, synthetic construct
  source 1..103: mol_type = other RNA
  modified_base 1: mod_base = OTHER; note = 2'-O-methyl cytidine phosphorothioate
  modified_base 2: mod_base = OTHER; note = 2'-O-methyl uridine phosphorothioate
  modified_base 3: mod_base = OTHER; note = 2'-O-methyl guanosine phosphorothioate
  modified_base 37: mod_base = OTHER; note = 2'-O-methyl guanosine
  modified_base 38: mod_base = OTHER; note = 2'-O-methyl adenosine
  modified_base 39: mod_base = OTHER; note = 2'-O-methyl adenosine
  modified_base 40: mod_base = OTHER; note = 2'-O-methyl adenosine
  modified_base 61: mod_base = OTHER; note = 2'-O-methyl cytidine
  modified_base 62: mod_base = OTHER; note = 2'-O-methyl uridine
  modified_base 63: mod_base = OTHER; note = 2'-O-methyl guanosine
  modified_base 64: mod_base = OTHER; note = 2'-O-methyl adenosine
  modified_base 65: mod_base = OTHER; note = 2'-O-methyl adenosine
  modified_base 66: mod_base = OTHER; note = 2'-O-methyl adenosine
  modified_base 67: mod_base = OTHER; note = 2'-O-methyl adenosine
  modified_base 68: mod_base = OTHER; note = 2'-O-methyl guanosine
  modified_base 89: mod_base = OTHER; note = 2'-O-methyl uridine
  modified_base 90: mod_base = OTHER; note = 2'-O-methyl uridine
  modified_base 91: mod_base = OTHER; note = 2'-O-methyl cytidine
  modified_base 92: mod_base = OTHER; note = 2'-O-methyl uridine
  modified_base 100: mod_base = OTHER; note = Uridine phosphorothioate
  modified_base 101: mod_base = OTHER; note = 2'-O-methyl uridine phosphorothioate
  modified_base 102: mod_base = OTHER; note = 2'-O-methyl uridine phosphorothioate
  modified_base 103: mod_base = OTHER; note = 2'-O-methyl adenosine
ctgaacttgtggccgtttacgtcggttgtagctcccgaaacgttgctacaataaggccgtctgaaaagatgtgccgcaacgctctgccttctggcatcgttta

SEQ ID NO: 437 - RNA, 103 nt, synthetic construct; identical to SEQ ID NO: 436
  source 1..103: mol_type = other RNA
  modified_base 1: mod_base = OTHER; note = 2'-O-methyl cytidine phosphorothioate
  modified_base 2: mod_base = OTHER; note = 2'-O-methyl uridine phosphorothioate
  modified_base 3: mod_base = OTHER; note = 2'-O-methyl guanosine phosphorothioate
  modified_base 30: mod_base = OTHER; note = 2'-O-methyl adenosine
  modified_base 31: mod_base = OTHER; note = 2'-O-methyl guanosine
  modified_base 32: mod_base = OTHER; note = 2'-O-methyl cytidine
  modified_base 37: mod_base = OTHER; note = 2'-O-methyl guanosine
  modified_base 38: mod_base = OTHER; note = 2'-O-methyl adenosine
  modified_base 39: mod_base = OTHER; note = 2'-O-methyl adenosine
  modified_base 40: mod_base = OTHER; note = 2'-O-methyl adenosine
  modified_base 57: mod_base = OTHER; note = 2'-O-methyl cytidine
  modified_base 58: mod_base = OTHER; note = 2'-O-methyl cytidine
  modified_base 60: mod_base = OTHER; note = 2'-O-methyl uridine
  modified_base 61: mod_base = OTHER; note = 2'-O-methyl cytidine
  modified_base 62: mod_base = OTHER; note = 2'-O-methyl uridine
  modified_base 63: mod_base = OTHER; note = 2'-O-methyl guanosine
  modified_base 64: mod_base = OTHER; note = 2'-O-methyl adenosine
  modified_base 65: mod_base = OTHER; note = 2'-O-methyl adenosine
  modified_base 66: mod_base = OTHER; note = 2'-O-methyl adenosine
  modified_base 67: mod_base = OTHER; note = 2'-O-methyl adenosine
  modified_base 68: mod_base = OTHER; note = 2'-O-methyl guanosine
  modified_base 83: mod_base = OTHER; note = 2'-O-methyl uridine
  modified_base 84: mod_base = OTHER; note = 2'-O-methyl cytidine
  modified_base 85: mod_base = OTHER; note = 2'-O-methyl uridine
  modified_base 86: mod_base = OTHER; note = 2'-O-methyl guanosine
  modified_base 89: mod_base = OTHER; note = 2'-O-methyl uridine
  modified_base 90: mod_base = OTHER; note = 2'-O-methyl uridine
  modified_base 91: mod_base = OTHER; note = 2'-O-methyl cytidine
  modified_base 92: mod_base = OTHER; note = 2'-O-methyl uridine
  modified_base 98: mod_base = OTHER; note = 2'-O-methyl cytidine
  modified_base 99: mod_base = OTHER; note = 2'-O-methyl guanosine
  modified_base 100: mod_base = OTHER; note = 2'-O-methyl uridine phosphorothioate
  modified_base 101: mod_base = OTHER; note = 2'-O-methyl uridine phosphorothioate
  modified_base 102: mod_base = OTHER; note = 2'-O-methyl uridine phosphorothioate
  modified_base 103: mod_base = OTHER; note = 2'-O-methyl adenosine

SEQ ID NO: 438 - RNA, 103 nt, synthetic construct; identical to SEQ ID NO: 436
  source 1..103: mol_type = other RNA
  modified_base 1: mod_base = OTHER; note = 2'-O-methyl cytidine phosphorothioate
  modified_base 2: mod_base = OTHER; note = 2'-O-methyl uridine phosphorothioate
  modified_base 3: mod_base = OTHER; note = 2'-O-methyl guanosine phosphorothioate
  modified_base 4: mod_base = OTHER; note = 2'-O-methyl adenosine
  modified_base 5: mod_base = OTHER; note = 2'-O-methyl adenosine
  modified_base 9: mod_base = OTHER; note = 2'-O-methyl guanosine
  modified_base 10: mod_base = OTHER; note = 2'-O-methyl uridine
  modified_base 11: mod_base = OTHER; note = 2'-O-methyl guanosine
  modified_base 13: mod_base = OTHER; note = 2'-O-methyl cytidine
  modified_base 18: mod_base = OTHER; note = 2'-O-methyl uridine
  modified_base 22: mod_base = OTHER; note = 2'-O-methyl uridine
  modified_base 25: mod_base = OTHER; note = 2'-O-methyl guanosine
  modified_base 29: mod_base = OTHER; note = 2'-O-methyl uridine
  modified_base 30: mod_base = OTHER; note = 2'-O-methyl adenosine
  modified_base 31: mod_base = OTHER; note = 2'-O-methyl guanosine
  modified_base 32: mod_base = OTHER; note = 2'-O-methyl cytidine
  modified_base 37: mod_base = OTHER; note = 2'-O-methyl guanosine
  modified_base 38: mod_base = OTHER; note = 2'-O-methyl adenosine
  modified_base 39: mod_base = OTHER; note = 2'-O-methyl adenosine
  modified_base 40: mod_base = OTHER; note = 2'-O-methyl adenosine
  modified_base 41: mod_base = OTHER; note = 2'-O-methyl cytidine
  modified_base 43: mod_base = OTHER; note = 2'-O-methyl uridine
  modified_base 45: mod_base = OTHER; note = 2'-O-methyl guanosine
  modified_base 46: mod_base = OTHER; note = 2'-O-methyl cytidine
  modified_base 48: mod_base = OTHER; note = 2'-O-methyl adenosine
  modified_base 49: mod_base = OTHER; note = 2'-O-methyl cytidine
  modified_base 54: mod_base = OTHER; note = 2'-O-methyl adenosine
  modified_base 56: mod_base = OTHER; note = 2'-O-methyl guanosine
  modified_base 57: mod_base = OTHER; note = 2'-O-methyl cytidine
  modified_base 58: mod_base = OTHER; note = 2'-O-methyl cytidine
  modified_base 59: mod_base = OTHER; note = 2'-O-methyl guanosine
  modified_base 60: mod_base = OTHER; note = 2'-O-methyl uridine
  modified_base 61: mod_base = OTHER; note = 2'-O-methyl cytidine
  modified_base 62: mod_base = OTHER; note = 2'-O-methyl uridine
  modified_base 63: mod_base = OTHER; note = 2'-O-methyl guanosine
  modified_base 64: mod_base = OTHER; note = 2'-O-methyl adenosine
  modified_base 65: mod_base = OTHER; note = 2'-O-methyl adenosine
  modified_base 66: mod_base = OTHER; note = 2'-O-methyl adenosine
  modified_base 67: mod_base = OTHER; note = 2'-O-methyl adenosine
  modified_base 68: mod_base = OTHER; note = 2'-O-methyl guanosine
  modified_base 69: mod_base = OTHER; note = 2'-O-methyl adenosine
  modified_base 70: mod_base = OTHER; note = 2'-O-methyl uridine
  modified_base 72: mod_base = OTHER; note = 2'-O-methyl uridine
  modified_base 73: mod_base = OTHER; note = 2'-O-methyl guanosine
  modified_base 74: mod_base = OTHER; note = 2'-O-methyl cytidine
  modified_base 75: mod_base = OTHER; note = 2'-O-methyl cytidine
  modified_base 76: mod_base = OTHER; note = 2'-O-methyl guanosine
  modified_base 77: mod_base = OTHER; note = 2'-O-methyl cytidine
  modified_base 78: mod_base = OTHER; note = 2'-O-methyl adenosine
  modified_base 79: mod_base = OTHER; note = 2'-O-methyl adenosine
  modified_base 80: mod_base = OTHER; note = 2'-O-methyl cytidine
  modified_base 81: mod_base = OTHER; note = 2'-O-methyl guanosine
  modified_base 82: mod_base = OTHER; note = 2'-O-methyl cytidine
  modified_base 83: mod_base = OTHER; note = 2'-O-methyl uridine
  modified_base 84: mod_base = OTHER; note = 2'-O-methyl cytidine
  modified_base 85: mod_base = OTHER; note = 2'-O-methyl uridine
  modified_base 86: mod_base = OTHER; note = 2'-O-methyl guanosine
  modified_base 87: mod_base = OTHER; note = 2'-O-methyl cytidine
  modified_base 88: mod_base = OTHER; note = 2'-O-methyl cytidine
  modified_base 89: mod_base = OTHER; note = 2'-O-methyl uridine
  modified_base 90: mod_base = OTHER; note = 2'-O-methyl uridine
  modified_base 91: mod_base = OTHER; note = 2'-O-methyl cytidine
  modified_base 92: mod_base = OTHER; note = 2'-O-methyl uridine
  modified_base 94: mod_base = OTHER; note = 2'-O-methyl guanosine
  modified_base 96: mod_base = OTHER; note = 2'-O-methyl adenosine
  modified_base 97: mod_base = OTHER; note = 2'-O-methyl uridine
  modified_base 98: mod_base = OTHER; note = 2'-O-methyl cytidine
  modified_base 99: mod_base = OTHER; note = 2'-O-methyl guanosine
  modified_base 100: mod_base = OTHER; note = 2'-O-methyl uridine phosphorothioate
  modified_base 101: mod_base = OTHER; note = 2'-O-methyl uridine phosphorothioate
  modified_base 102: mod_base = OTHER; note = 2'-O-methyl uridine phosphorothioate
  modified_base 103: mod_base = OTHER; note = 2'-O-methyl adenosine

SEQ ID NO: 439 - RNA, 103 nt, synthetic construct; identical to SEQ ID NO: 436
  source 1..103: mol_type = other RNA
  modified_base 1: mod_base = OTHER; note = 2'-O-methyl cytidine phosphorothioate
  modified_base 2: mod_base = OTHER; note = 2'-O-methyl uridine phosphorothioate
  modified_base 3: mod_base = OTHER; note = 2'-O-methyl guanosine phosphorothioate
  modified_base 4: mod_base = OTHER; note = 2'-O-methyl adenosine
  modified_base 5: mod_base = OTHER; note = 2'-O-methyl adenosine
  modified_base 9: mod_base = OTHER; note = 2'-O-methyl guanosine
  modified_base 10: mod_base = OTHER; note = 2'-O-methyl uridine
  modified_base 11: mod_base = OTHER; note = 2'-O-methyl guanosine
  modified_base 13: mod_base = OTHER; note = 2'-O-methyl cytidine
  modified_base 16: mod_base = OTHER; note = 2'-O-methyl uridine
  modified_base 18: mod_base = OTHER; note = 2'-O-methyl uridine
  modified_base 22: mod_base = OTHER; note = 2'-O-methyl uridine
  modified_base 25: mod_base = OTHER; note = 2'-O-methyl guanosine
  modified_base 29: mod_base = OTHER; note = 2'-O-methyl uridine
  modified_base 30: mod_base = OTHER; note = 2'-O-methyl adenosine
  modified_base 31: mod_base = OTHER; note = 2'-O-methyl guanosine
  modified_base 32: mod_base = OTHER; note = 2'-O-methyl cytidine
  modified_base 37: mod_base = OTHER; note = 2'-O-methyl guanosine
  modified_base 38: mod_base = OTHER; note = 2'-O-methyl adenosine
  modified_base 39: mod_base = OTHER; note = 2'-O-methyl adenosine
  modified_base 40: mod_base = OTHER; note = 2'-O-methyl adenosine
  modified_base 41: mod_base = OTHER; note = 2'-O-methyl cytidine
  modified_base 43: mod_base = OTHER; note = 2'-O-methyl uridine
  modified_base 45: mod_base = OTHER; note = 2'-O-methyl guanosine
  modified_base 46: mod_base = OTHER; note = 2'-O-methyl cytidine
  modified_base 48: mod_base = OTHER; note = 2'-O-methyl adenosine
  modified_base 49: mod_base = OTHER; note = 2'-O-methyl cytidine
  modified_base 54: mod_base = OTHER; note = 2'-O-methyl adenosine
  modified_base 56: mod_base = OTHER; note = 2'-O-methyl guanosine
  modified_base 57: mod_base = OTHER; note = 2'-fluoro cytidine
  modified_base 58: mod_base = OTHER; note = 2'-O-methyl cytidine
  modified_base 59: mod_base = OTHER; note = 2'-fluoro guanosine
  modified_base 60: mod_base = OTHER; note = 2'-O-methyl uridine
  modified_base 61: mod_base = OTHER; note = 2'-fluoro cytidine
  modified_base 62: mod_base = OTHER; note = 2'-O-methyl uridine
  modified_base 63: mod_base = OTHER; note = 2'-fluoro guanosine
  modified_base 64: mod_base = OTHER; note = 2'-O-methyl adenosine
  modified_base 65: mod_base = OTHER; note = 2'-fluoro adenosine
  modified_base 66: mod_base = OTHER; note = 2'-O-methyl adenosine
  modified_base 67: mod_base = OTHER; note = 2'-fluoro adenosine
  modified_base 68: mod_base = OTHER; note = 2'-O-methyl guanosine
  modified_base 69: mod_base = OTHER; note = 2'-fluoro adenosine
  modified_base 70: mod_base = OTHER; note = 2'-O-methyl uridine
  modified_base 72: mod_base = OTHER; note = 2'-O-methyl uridine
  modified_base 73: mod_base = OTHER; note = 2'-fluoro guanosine
  modified_base 74: mod_base = OTHER; note = 2'-O-methyl cytidine
  modified_base 75: mod_base = OTHER; note = 2'-fluoro cytidine
  modified_base 76: mod_base = OTHER; note = 2'-O-methyl guanosine
  modified_base 77: mod_base = OTHER; note = 2'-fluoro cytidine
  modified_base 78: mod_base = OTHER; note = 2'-O-methyl adenosine
  modified_base 79: mod_base = OTHER; note = 2'-fluoro adenosine
  modified_base 80: mod_base = OTHER; note = 2'-O-methyl cytidine
  modified_base 81: mod_base = OTHER; note = 2'-fluoro guanosine
  modified_base 82: mod_base = OTHER; note = 2'-O-methyl cytidine
  modified_base 83: mod_base = OTHER; note = 2'-fluoro uridine
  modified_base 84: mod_base = OTHER; note = 2'-O-methyl cytidine
  modified_base 85: mod_base = OTHER; note = 2'-fluoro uridine
  modified_base 86: mod_base = OTHER; note = 2'-O-methyl guanosine
  modified_base 87: mod_base = OTHER; note = 2'-fluoro cytidine
  modified_base 88: mod_base = OTHER; note = 2'-O-methyl cytidine
  modified_base 89: mod_base = OTHER; note = 2'-fluoro uridine
  modified_base 90: mod_base = OTHER; note = 2'-O-methyl uridine
  modified_base 91: mod_base = OTHER; note = 2'-fluoro cytidine
  modified_base 92: mod_base = OTHER; note = 2'-O-methyl uridine
  modified_base 94: mod_base = OTHER; note = 2'-O-methyl guanosine
  modified_base 96: mod_base = OTHER; note = 2'-O-methyl adenosine
  modified_base 97: mod_base = OTHER; note = 2'-fluoro uridine
  modified_base 98: mod_base = OTHER; note = 2'-O-methyl cytidine
  modified_base 99: mod_base = OTHER; note = 2'-fluoro guanosine
  modified_base 100: mod_base = OTHER; note = 2'-O-methyl uridine phosphorothioate
  modified_base 101: mod_base = OTHER; note = 2'-O-methyl uridine phosphorothioate
  modified_base 102: mod_base = OTHER; note = 2'-O-methyl uridine phosphorothioate
  modified_base 103: mod_base = OTHER; note = 2'-O-methyl adenosine

SEQ ID NO: 440 - RNA, 103 nt, synthetic construct; identical to SEQ ID NO: 436
  source 1..103: mol_type = other RNA
  modified_base 1: mod_base = OTHER; note = 2'-O-methyl cytidine phosphorothioate
  modified_base 2: mod_base = OTHER; note = 2'-O-methyl uridine phosphorothioate
  modified_base 3: mod_base = OTHER; note = 2'-O-methyl guanosine phosphorothioate
  modified_base 4: mod_base = OTHER; note = 2'-O-methyl adenosine
  modified_base 5: mod_base = OTHER; note = 2'-O-methyl adenosine
  modified_base 9: mod_base = OTHER; note = 2'-O-methyl guanosine
  modified_base 10: mod_base = OTHER; note = 2'-O-methyl uridine
  modified_base 11: mod_base = OTHER; note = 2'-O-methyl guanosine
  modified_base 13: mod_base = OTHER; note = 2'-O-methyl cytidine
  modified_base 18: mod_base = OTHER; note = 2'-O-methyl uridine
  modified_base 22: mod_base = OTHER; note = 2'-O-methyl uridine
  modified_base 25: mod_base = OTHER; note = 2'-O-methyl guanosine
  modified_base 29: mod_base = OTHER; note = 2'-O-methyl uridine
  modified_base 30: mod_base = OTHER; note = 2'-O-methyl adenosine
  modified_base 31: mod_base = OTHER; note = 2'-O-methyl guanosine
  modified_base 32: mod_base = OTHER; note = 2'-O-methyl cytidine
  modified_base 37: mod_base = OTHER; note = 2'-O-methyl guanosine
  modified_base 38: mod_base = OTHER; note = 2'-O-methyl adenosine
  modified_base 39: mod_base = OTHER; note = 2'-O-methyl adenosine
  modified_base 40: mod_base = OTHER; note = 2'-O-methyl adenosine
  modified_base 57: mod_base = OTHER; note = 2'-O-methyl cytidine
  modified_base 58: mod_base = OTHER; note = 2'-O-methyl cytidine
  modified_base 60: mod_base = OTHER; note = 2'-O-methyl uridine
  modified_base 61: mod_base = OTHER; note = 2'-O-methyl cytidine
  modified_base 62: mod_base = OTHER; note = 2'-O-methyl uridine
  modified_base 63: mod_base = OTHER; note = 2'-O-methyl guanosine
  modified_base 64: mod_base = OTHER; note = 2'-O-methyl adenosine
  modified_base 65: mod_base = OTHER; note = 2'-O-methyl adenosine
  modified_base 66: mod_base = OTHER; note = 2'-O-methyl adenosine
  modified_base 67: mod_base = OTHER; note = 2'-O-methyl adenosine
  modified_base 68: mod_base = OTHER; note = 2'-O-methyl guanosine
  modified_base 83: mod_base = OTHER; note = 2'-O-methyl uridine
  modified_base 84: mod_base = OTHER; note = 2'-O-methyl cytidine
  modified_base 85: mod_base = OTHER; note = 2'-O-methyl uridine
  modified_base 86: mod_base = OTHER; note = 2'-O-methyl guanosine
  modified_base 89: mod_base = OTHER; note = 2'-O-methyl uridine
  modified_base 90: mod_base = OTHER; note = 2'-O-methyl uridine
  modified_base 91: mod_base = OTHER; note = 2'-O-methyl cytidine
  modified_base 92: mod_base = OTHER; note = 2'-O-methyl uridine
  modified_base 98: mod_base = OTHER; note = 2'-O-methyl cytidine
  modified_base 99: mod_base = OTHER; note = 2'-O-methyl guanosine
  modified_base 100: mod_base = OTHER; note = 2'-O-methyl uridine phosphorothioate
  modified_base 101: mod_base = OTHER; note = 2'-O-methyl uridine phosphorothioate
  modified_base 102: mod_base = OTHER; note = 2'-O-methyl uridine phosphorothioate
  modified_base 103: mod_base = OTHER; note = 2'-O-methyl adenosine

SEQ ID NO: 441 - RNA, 103 nt, synthetic construct; identical to SEQ ID NO: 436
  source 1..103: mol_type = other RNA
  modified_base 1: mod_base = OTHER; note = 2'-O-methyl cytidine phosphorothioate
  modified_base 2: mod_base = OTHER; note = 2'-O-methyl uridine phosphorothioate
  modified_base 3: mod_base = OTHER; note = 2'-O-methyl guanosine phosphorothioate
  modified_base 5: mod_base = OTHER; note = 2'-O-methyl adenosine
  modified_base 9: mod_base = OTHER; note = 2'-O-methyl guanosine
  modified_base 10: mod_base = OTHER; note = 2'-O-methyl uridine
  modified_base 13: mod_base = OTHER; note = 2'-O-methyl cytidine
  modified_base 18: mod_base = OTHER; note = 2'-O-methyl uridine
  modified_base 22: mod_base = OTHER; note = 2'-O-methyl uridine
  modified_base 25: mod_base = OTHER; note = 2'-O-methyl guanosine
  modified_base 30: mod_base = OTHER; note = 2'-O-methyl adenosine
  modified_base 31: mod_base = OTHER; note = 2'-O-methyl guanosine
  modified_base 32: mod_base = OTHER; note = 2'-O-methyl cytidine
  modified_base 37: mod_base = OTHER; note = 2'-O-methyl guanosine
  modified_base 38: mod_base = OTHER; note = 2'-O-methyl adenosine
  modified_base 39: mod_base = OTHER; note = 2'-O-methyl adenosine
  modified_base 40: mod_base = OTHER; note = 2'-O-methyl adenosine
  modified_base 57: mod_base = OTHER; note = 2'-O-methyl cytidine
  modified_base 58: mod_base = OTHER; note = 2'-O-methyl cytidine
  modified_base 60: mod_base = OTHER; note = 2'-O-methyl uridine
  modified_base 61: mod_base = OTHER; note = 2'-O-methyl cytidine
  modified_base 62: mod_base = OTHER; note = 2'-O-methyl uridine
  modified_base 63: mod_base = OTHER; note = 2'-O-methyl guanosine
  modified_base 64: mod_base = OTHER; note = 2'-O-methyl adenosine
  modified_base 65: mod_base = OTHER; note = 2'-O-methyl adenosine
  modified_base 66: mod_base = OTHER; note = 2'-O-methyl adenosine
  modified_base 67: mod_base = OTHER; note = 2'-O-methyl adenosine
  modified_base 68: mod_base = OTHER; note = 2'-O-methyl guanosine
  modified_base 83: mod_base = OTHER; note = 2'-O-methyl uridine
  modified_base 84: mod_base = OTHER; note = 2'-O-methyl cytidine
  modified_base 85: mod_base = OTHER; note = 2'-O-methyl uridine
  modified_base 86: mod_base = OTHER; note = 2'-O-methyl guanosine
  modified_base 89: mod_base = OTHER; note = 2'-O-methyl uridine
  modified_base 90: mod_base = OTHER; note = 2'-O-methyl uridine
  modified_base 91: mod_base = OTHER; note = 2'-O-methyl cytidine
  modified_base 92: mod_base = OTHER; note = 2'-O-methyl uridine
  modified_base 98: mod_base = OTHER; note = 2'-O-methyl cytidine
  modified_base 99: mod_base = OTHER; note = 2'-O-methyl guanosine
  modified_base 100: mod_base = OTHER; note = 2'-O-methyl uridine phosphorothioate
  modified_base 101: mod_base = OTHER; note = 2'-O-methyl uridine phosphorothioate
  modified_base 102: mod_base = OTHER; note = 2'-O-methyl uridine phosphorothioate
  modified_base 103: mod_base = OTHER; note = 2'-O-methyl adenosine

SEQ ID NO: 442 - RNA, 103 nt, synthetic construct; identical to SEQ ID NO: 436
  source 1..103: mol_type = other RNA
  modified_base 1: mod_base = OTHER; note = 2'-O-methyl cytidine phosphorothioate
  modified_base 2: mod_base = OTHER; note = 2'-O-methyl uridine phosphorothioate
  modified_base 3: mod_base = OTHER; note = 2'-O-methyl guanosine phosphorothioate
  modified_base 18: mod_base = OTHER; note = 2'-O-methyl uridine
  modified_base 22: mod_base = OTHER; note = 2'-O-methyl uridine
  modified_base 30: mod_base = OTHER; note = 2'-O-methyl adenosine
  modified_base 31: mod_base = OTHER; note = 2'-O-methyl guanosine
  modified_base 32: mod_base = OTHER; note = 2'-O-methyl cytidine
  modified_base 37: mod_base = OTHER; note = 2'-O-methyl guanosine
  modified_base 38: mod_base = OTHER; note = 2'-O-methyl adenosine
  modified_base 39: mod_base = OTHER; note = 2'-O-methyl adenosine
  modified_base 40: mod_base = OTHER; note = 2'-O-methyl adenosine
  modified_base 57: mod_base = OTHER; note = 2'-O-methyl cytidine
  modified_base 58: mod_base = OTHER; note = 2'-O-methyl cytidine
  modified_base 60: mod_base = OTHER; note = 2'-O-methyl uridine
  modified_base 61: mod_base = OTHER; note = 2'-O-methyl cytidine
  modified_base 62: mod_base = OTHER; note = 2'-O-methyl uridine
  modified_base 63: mod_base = OTHER; note = 2'-O-methyl guanosine
  modified_base 64: mod_base = OTHER; note = 2'-O-methyl adenosine
  modified_base 65: mod_base = OTHER; note = 2'-O-methyl adenosine
  modified_base 66: mod_base = OTHER; note = 2'-O-methyl adenosine
  modified_base 67: mod_base = OTHER; note = 2'-O-methyl adenosine
  modified_base 68: mod_base = OTHER; note = 2'-O-methyl guanosine
  modified_base 83: mod_base = OTHER; note = 2'-O-methyl uridine
  modified_base 84: mod_base = OTHER; note = 2'-O-methyl cytidine
  modified_base 85: mod_base = OTHER; note = 2'-O-methyl uridine
  modified_base 86: mod_base = OTHER; note = 2'-O-methyl guanosine
  modified_base 89: mod_base = OTHER; note = 2'-O-methyl uridine
  modified_base 90: mod_base = OTHER; note = 2'-O-methyl uridine
  modified_base 91: mod_base = OTHER; note = 2'-O-methyl cytidine
  modified_base 92: mod_base = OTHER; note = 2'-O-methyl uridine
  modified_base 98: mod_base = OTHER; note = 2'-O-methyl cytidine
  modified_base 99: mod_base = OTHER; note = 2'-O-methyl guanosine
  modified_base 100: mod_base = OTHER; note = 2'-O-methyl uridine phosphorothioate
  modified_base 101: mod_base = OTHER; note = 2'-O-methyl uridine phosphorothioate
  modified_base 102: mod_base = OTHER; note = 2'-O-methyl uridine phosphorothioate
  modified_base 103: mod_base = OTHER; note = 2'-O-methyl adenosine

SEQ ID NO: 443 - RNA, 103 nt, synthetic construct; identical to SEQ ID NO: 436
  source 1..103: mol_type = other RNA
  modified_base 1: mod_base = OTHER; note = 2'-O-methyl cytidine phosphorothioate
  modified_base 2: mod_base = OTHER; note = 2'-O-methyl uridine phosphorothioate
  modified_base 3: mod_base = OTHER; note = 2'-O-methyl guanosine phosphorothioate
  modified_base 4: mod_base = OTHER; note = 2'-O-methyl adenosine
  modified_base 5: mod_base = OTHER; note = 2'-O-methyl adenosine
  modified_base 6: mod_base = OTHER; note = 2'-O-methyl cytidine
  modified_base 7: mod_base = OTHER; note = 2'-O-methyl uridine
  modified_base 8: mod_base = OTHER; note = 2'-O-methyl uridine
  modified_base 9: mod_base = OTHER; note = 2'-O-methyl guanosine
  modified_base 10: mod_base = OTHER; note = 2'-O-methyl uridine
  modified_base 11: mod_base = OTHER; note = 2'-O-methyl guanosine
  modified_base 12: mod_base = OTHER; note = 2'-O-methyl guanosine
  modified_base 13: mod_base = OTHER; note = 2'-O-methyl cytidine
  modified_base 14: mod_base = OTHER; note = 2'-O-methyl cytidine
  modified_base 30: mod_base = OTHER; note = 2'-O-methyl adenosine
  modified_base 31: mod_base = OTHER; note = 2'-O-methyl guanosine
  modified_base 32: mod_base = OTHER; note = 2'-O-methyl cytidine
  modified_base 37: mod_base = OTHER; note = 2'-O-methyl guanosine
  modified_base 38: mod_base = OTHER; note = 2'-O-methyl adenosine
  modified_base 39: mod_base = OTHER; note = 2'-O-methyl adenosine
  modified_base 40: mod_base = OTHER; note = 2'-O-methyl adenosine
  modified_base 57: mod_base = OTHER; note = 2'-O-methyl cytidine
  modified_base 58: mod_base = OTHER; note = 2'-O-methyl cytidine
  modified_base 60: mod_base = OTHER; note = 2'-O-methyl uridine
  modified_base 61: mod_base = OTHER; note = 2'-O-methyl cytidine
  modified_base 62: mod_base = OTHER; note = 2'-O-methyl uridine
  modified_base 63: mod_base = OTHER; note = 2'-O-methyl guanosine
  modified_base 64: mod_base = OTHER; note = 2'-O-methyl adenosine
  modified_base 65: mod_base = OTHER; note = 2'-O-methyl adenosine
  modified_base 66: mod_base = OTHER; note = 2'-O-methyl adenosine
  modified_base 67: mod_base = OTHER; note = 2'-O-methyl adenosine
  modified_base 68: mod_base = OTHER; note = 2'-O-methyl guanosine
  modified_base 83: mod_base = OTHER; note = 2'-O-methyl uridine
  modified_base 84: mod_base = OTHER; note = 2'-O-methyl cytidine
  modified_base 85: mod_base = OTHER; note = 2'-O-methyl uridine
  modified_base 86: mod_base = OTHER; note = 2'-O-methyl guanosine
  modified_base 89: mod_base = OTHER; note = 2'-O-methyl uridine
  modified_base 90: mod_base = OTHER; note = 2'-O-methyl uridine
  modified_base 91: mod_base = OTHER; note = 2'-O-methyl cytidine
  modified_base 92: mod_base = OTHER; note = 2'-O-methyl uridine
  modified_base 98: mod_base = OTHER; note = 2'-O-methyl cytidine
  modified_base 99: mod_base = OTHER; note = 2'-O-methyl guanosine
  modified_base 100: mod_base = OTHER; note = 2'-O-methyl uridine phosphorothioate
  modified_base 101: mod_base = OTHER; note = 2'-O-methyl uridine phosphorothioate
  modified_base 102: mod_base = OTHER; note = 2'-O-methyl uridine phosphorothioate
  modified_base 103: mod_base = OTHER; note = 2'-O-methyl adenosine

SEQ ID NO: 444 - RNA, 103 nt, synthetic construct; identical to SEQ ID NO: 436
  source 1..103: mol_type = other RNA
  modified_base 1: mod_base = OTHER; note = 2'-O-methyl cytidine phosphorothioate
  modified_base 2: mod_base = OTHER; note = 2'-O-methyl uridine phosphorothioate
  modified_base 3: mod_base = OTHER; note = 2'-O-methyl guanosine phosphorothioate
  modified_base 4: mod_base = OTHER; note = 2'-O-methyl adenosine
  modified_base 5: mod_base = OTHER; note = 2'-O-methyl adenosine
  modified_base 6: mod_base = OTHER; note = 2'-O-methyl cytidine
  modified_base 7: mod_base = OTHER; note = 2'-O-methyl uridine
  modified_base 8: mod_base = OTHER; note = 2'-O-methyl uridine
  modified_base 9: mod_base = OTHER; note = 2'-O-methyl guanosine
  modified_base 10: mod_base = OTHER; note = 2'-O-methyl uridine
  modified_base 11: mod_base = OTHER; note = 2'-O-methyl guanosine
  modified_base 12: mod_base = OTHER; note = 2'-O-methyl guanosine
  modified_base 13: mod_base = OTHER; note = 2'-O-methyl cytidine
  modified_base 14: mod_base = OTHER; note = 2'-O-methyl cytidine
  modified_base 18: mod_base = OTHER; note = 2'-O-methyl uridine
  modified_base 22: mod_base = OTHER; note = 2'-O-methyl uridine
  modified_base 25: mod_base = OTHER; note = 2'-O-methyl guanosine
  modified_base 29: mod_base = OTHER; note = 2'-O-methyl uridine
  modified_base 30: mod_base = OTHER; note = 2'-O-methyl adenosine
  modified_base 31: mod_base = OTHER; note = 2'-O-methyl guanosine
  modified_base 32: mod_base = OTHER; note = 2'-O-methyl cytidine
  modified_base 37: mod_base = OTHER; note = 2'-O-methyl guanosine
  modified_base 38: mod_base = OTHER; note = 2'-O-methyl adenosine
  modified_base 39: mod_base = OTHER; note = 2'-O-methyl adenosine
  modified_base 40: mod_base = OTHER; note = 2'-O-methyl adenosine
  modified_base 57: mod_base = OTHER; note = 2'-O-methyl cytidine
  modified_base 58: mod_base = OTHER; note = 2'-O-methyl cytidine
  modified_base 60: mod_base = OTHER; note = 2'-O-methyl uridine
  modified_base 61: mod_base = OTHER; note = 2'-O-methyl cytidine
  modified_base 62: mod_base = OTHER; note = 2'-O-methyl uridine
  modified_base 63: mod_base = OTHER; note = 2'-O-methyl guanosine
  modified_base 64: mod_base = OTHER; note = 2'-O-methyl adenosine
  modified_base 65: mod_base = OTHER; note = 2'-O-methyl adenosine
  modified_base 66: mod_base = OTHER; note = 2'-O-methyl adenosine
  modified_base 67: mod_base = OTHER; note = 2'-O-methyl adenosine
  modified_base 68: mod_base = OTHER; note = 2'-O-methyl guanosine
  modified_base 83: mod_base = OTHER; note = 2'-O-methyl uridine
  modified_base 84: mod_base = OTHER; note = 2'-O-methyl cytidine
  modified_base 85: mod_base = OTHER; note = 2'-O-methyl uridine
  modified_base 86: mod_base = OTHER; note = 2'-O-methyl guanosine
  modified_base 89: mod_base = OTHER; note = 2'-O-methyl uridine
  modified_base 90: mod_base = OTHER; note = 2'-O-methyl uridine
  modified_base 91: mod_base = OTHER; note = 2'-O-methyl cytidine
  modified_base 92: mod_base = OTHER; note = 2'-O-methyl uridine
  modified_base 98: mod_base = OTHER; note = 2'-O-methyl cytidine
  modified_base 99: mod_base = OTHER; note = 2'-O-methyl guanosine
  modified_base 100: mod_base = OTHER; note = 2'-O-methyl uridine phosphorothioate
  modified_base 101: mod_base = OTHER; note = 2'-O-methyl uridine phosphorothioate
  modified_base 102: mod_base = OTHER; note = 2'-O-methyl uridine phosphorothioate
  modified_base 103: mod_base = OTHER; note = 2'-O-methyl adenosine

SEQ ID NO: 445 - RNA, 103 nt, synthetic construct; identical to SEQ ID NO: 436
  source 1..103: mol_type = other RNA
  modified_base 1: mod_base = OTHER; note = 2'-O-methyl cytidine phosphorothioate
  modified_base 2: mod_base = OTHER; note = 2'-O-methyl uridine phosphorothioate
  modified_base 3: mod_base = OTHER; note = 2'-O-methyl guanosine phosphorothioate
  modified_base 4: mod_base = OTHER; note = 2'-O-methyl adenosine
  modified_base 5: mod_base = OTHER; note = 2'-O-methyl adenosine
  modified_base 9: mod_base = OTHER; note = 2'-O-methyl guanosine
  modified_base 10: mod_base = OTHER; note = 2'-O-methyl uridine
  modified_base 11: mod_base = OTHER; note = 2'-O-methyl guanosine
  modified_base 13: mod_base = OTHER; note = 2'-O-methyl cytidine
  modified_base 18: mod_base = OTHER; note = 2'-O-methyl uridine
  modified_base 22: mod_base = OTHER; note = 2'-O-methyl uridine
  modified_base 25: mod_base = OTHER; note = 2'-O-methyl guanosine
  modified_base 29: mod_base = OTHER; note = 2'-O-methyl uridine
  modified_base 30: mod_base = OTHER; note = 2'-O-methyl adenosine
  modified_base 31: mod_base = OTHER; note = 2'-O-methyl guanosine
  modified_base 32: mod_base = OTHER; note = 2'-O-methyl cytidine
  modified_base 37: mod_base = OTHER; note = 2'-O-methyl guanosine
  modified_base 38: mod_base = OTHER; note = 2'-O-methyl adenosine
  modified_base 39: mod_base = OTHER; note = 2'-O-methyl adenosine
  modified_base 40: mod_base = OTHER; note = 2'-O-methyl adenosine
  modified_base 54: mod_base = OTHER; note = 2'-O-methyl adenosine
  modified_base 56: mod_base = OTHER; note = 2'-O-methyl guanosine
  modified_base 57: mod_base = OTHER; note = 2'-O-methyl cytidine
  modified_base 58: mod_base = OTHER; note = 2'-O-methyl cytidine
  modified_base 59: mod_base = OTHER; note = 2'-O-methyl guanosine
  modified_base 60: mod_base = OTHER; note = 2'-O-methyl uridine
  modified_base 61: mod_base = OTHER; note = 2'-O-methyl cytidine
  modified_base 62: mod_base = OTHER; note = 2'-O-methyl uridine
  modified_base 63: mod_base = OTHER; note = 2'-O-methyl guanosine
  modified_base 64: mod_base = OTHER; note = 2'-O-methyl adenosine
  modified_base 65: mod_base = OTHER; note = 2'-O-methyl adenosine
  modified_base 66: mod_base = OTHER; note = 2'-O-methyl adenosine
  modified_base 67: mod_base = OTHER; note = 2'-O-methyl adenosine
  modified_base 68: mod_base = OTHER; note = 2'-O-methyl guanosine
  modified_base 69: mod_base = OTHER; note = 2'-O-methyl adenosine
  modified_base 70: mod_base = OTHER; note = 2'-O-methyl uridine
  modified_base 73: mod_base = OTHER; note = 2'-O-methyl guanosine
  modified_base 74: mod_base = OTHER; note = 2'-O-methyl cytidine
  modified_base 75: mod_base = OTHER; note = 2'-O-methyl cytidine
  modified_base 83: mod_base = OTHER; note = 2'-O-methyl uridine
  modified_base 84: mod_base = OTHER; note = 2'-O-methyl cytidine
  modified_base 85: mod_base = OTHER; note = 2'-O-methyl uridine
  modified_base 86: mod_base = OTHER; note = 2'-O-methyl guanosine
  modified_base 89: mod_base = OTHER; note = 2'-O-methyl uridine
  modified_base 90: mod_base = OTHER; note = 2'-O-methyl uridine
  modified_base 91: mod_base = OTHER; note = 2'-O-methyl cytidine
  modified_base 92: mod_base = OTHER; note = 2'-O-methyl uridine
  modified_base 98: mod_base = OTHER; note = 2'-O-methyl cytidine
  modified_base 99: mod_base = OTHER; note = 2'-O-methyl guanosine
  modified_base 100: mod_base = OTHER; note = 2'-O-methyl uridine phosphorothioate
  modified_base 101: mod_base = OTHER; note = 2'-O-methyl uridine phosphorothioate
  modified_base 102: mod_base = OTHER; note = 2'-O-methyl uridine phosphorothioate
  modified_base 103: mod_base = OTHER; note = 2'-O-methyl adenosine

SEQ ID NO: 446 - RNA, 103 nt, synthetic construct; identical to SEQ ID NO: 436
  source 1..103: mol_type = other RNA
  modified_base 1: mod_base = OTHER; note = 2'-O-methyl cytidine phosphorothioate
  modified_base 2: mod_base = OTHER; note = 2'-O-methyl uridine phosphorothioate
  modified_base 3: mod_base = OTHER; note = 2'-O-methyl guanosine phosphorothioate
  modified_base 4: mod_base = OTHER; note = 2'-O-methyl adenosine
  modified_base 5: mod_base = OTHER; note = 2'-O-methyl adenosine
  modified_base 9: mod_base = OTHER; note = 2'-O-methyl guanosine
  modified_base 10: mod_base = OTHER; note = 2'-O-methyl uridine
  modified_base 11: mod_base = OTHER; note = 2'-O-methyl guanosine
  modified_base 13: mod_base = OTHER; note = 2'-O-methyl cytidine
  modified_base 18: mod_base = OTHER; note = 2'-O-methyl uridine
  modified_base 22: mod_base = OTHER; note = 2'-O-methyl uridine
  modified_base 25: mod_base = OTHER; note = 2'-O-methyl guanosine
  modified_base 29: mod_base = OTHER; note = 2'-O-methyl uridine
  modified_base 30: mod_base = OTHER; note = 2'-O-methyl adenosine
  modified_base 31: mod_base = OTHER; note = 2'-O-methyl guanosine
  modified_base 32: mod_base = OTHER; note = 2'-O-methyl cytidine
  modified_base 37: mod_base = OTHER; note = 2'-O-methyl guanosine
  modified_base 38: mod_base = OTHER; note = 2'-O-methyl adenosine
  modified_base 39: mod_base = OTHER; note = 2'-O-methyl adenosine
  modified_base 40: mod_base = OTHER; note = 2'-O-methyl adenosine
  modified_base 57: mod_base = OTHER; note = 2'-O-methyl cytidine
  modified_base 58: mod_base = OTHER; note = 2'-O-methyl cytidine
  modified_base 60: mod_base = OTHER; note = 2'-O-methyl uridine
  modified_base 61: mod_base = OTHER; note = 2'-O-methyl cytidine
  modified_base 62: mod_base = OTHER; note = 2'-O-methyl uridine
  modified_base 63: mod_base = OTHER; note = 2'-O-methyl guanosine
  modified_base 64: mod_base = OTHER; note = 2'-O-methyl adenosine
  modified_base 65: mod_base = OTHER; note = 2'-O-methyl adenosine
  modified_base 66: mod_base = OTHER; note = 2'-O-methyl adenosine
  modified_base 67: mod_base = OTHER; note = 2'-O-methyl adenosine
  modified_base 68: mod_base = OTHER; note = 2'-O-methyl guanosine
  modified_base 76: mod_base = OTHER; note = 2'-O-methyl guanosine
  modified_base 78: mod_base = OTHER; note = 2'-O-methyl adenosine
  modified_base 79: mod_base = OTHER; note = 2'-O-methyl adenosine
  modified_base 80: mod_base = OTHER; note = 2'-O-methyl cytidine
  modified_base 81: mod_base = OTHER; note = 2'-O-methyl guanosine
  modified_base 82: mod_base = OTHER; note = 2'-O-methyl cytidine
  modified_base 83: mod_base = OTHER; note = 2'-O-methyl uridine
  modified_base 84: mod_base = OTHER; note = 2'-O-methyl cytidine
  modified_base 85: mod_base = OTHER; note = 2'-O-methyl uridine
  modified_base 86: mod_base = OTHER; note = 2'-O-methyl guanosine
  modified_base 87: mod_base = OTHER; note = 2'-O-methyl cytidine
  modified_base 88: mod_base = OTHER; note = 2'-O-methyl cytidine
  modified_base 89: mod_base = OTHER; note = 2'-O-methyl uridine
  modified_base 90: mod_base = OTHER; note = 2'-O-methyl uridine
  modified_base 91: mod_base = OTHER; note = 2'-O-methyl cytidine
  modified_base 92: mod_base = OTHER; note = 2'-O-methyl uridine
  modified_base 94: mod_base = OTHER; note = 2'-O-methyl guanosine
  modified_base 96: mod_base = OTHER; note = 2'-O-methyl adenosine
  modified_base 98: mod_base = OTHER; note = 2'-O-methyl cytidine
  modified_base 99: mod_base = OTHER; note = 2'-O-methyl guanosine
  modified_base 100: mod_base = OTHER; note = 2'-O-methyl uridine phosphorothioate
  modified_base 101: mod_base = OTHER; note = 2'-O-methyl uridine phosphorothioate
  modified_base 102: mod_base = OTHER; note = 2'-O-methyl uridine phosphorothioate
  modified_base 103: mod_base = OTHER; note = 2'-O-methyl adenosine

SEQ ID NO: 447 - RNA, 103 nt, synthetic construct; identical to SEQ ID NO: 436
  source 1..103: mol_type = other RNA
  modified_base 1: mod_base = OTHER; note = 2'-O-methyl cytidine phosphorothioate
  modified_base 2: mod_base = OTHER; note = 2'-O-methyl uridine phosphorothioate
  modified_base 3: mod_base = OTHER; note = 2'-O-methyl guanosine phosphorothioate
  modified_base 4: mod_base = OTHER; note = 2'-O-methyl adenosine
  modified_base 5: mod_base = OTHER; note = 2'-O-methyl adenosine
  modified_base 9: mod_base = OTHER; note = 2'-O-methyl guanosine
  modified_base 10: mod_base = OTHER; note = 2'-O-methyl uridine
  modified_base 11: mod_base = OTHER; note = 2'-O-methyl guanosine
  modified_base 13: mod_base = OTHER; note = 2'-O-methyl cytidine
  modified_base 18: mod_base = OTHER; note = 2'-O-methyl uridine
  modified_base 22: mod_base = OTHER; note = 2'-O-methyl uridine
  modified_base 25: mod_base = OTHER; note = 2'-fluoro guanosine
  modified_base 29: mod_base = OTHER; note = 2'-fluoro uridine
  modified_base 30: mod_base = OTHER; note = 2'-fluoro adenosine
  modified_base 31: mod_base = OTHER; note = 2'-fluoro guanosine
  modified_base 32: mod_base = OTHER; note = 2'-fluoro cytidine
  modified_base 37: mod_base = OTHER; note = 2'-O-methyl guanosine
  modified_base 38: mod_base = OTHER; note = 2'-O-methyl adenosine
  modified_base 39: mod_base = OTHER; note = 2'-O-methyl adenosine
  modified_base 40: mod_base = OTHER; note = 2'-O-methyl adenosine
  modified_base 57: mod_base = OTHER; note = 2'-fluoro cytidine
  modified_base 58: mod_base = OTHER; note = 2'-fluoro cytidine
  modified_base 60: mod_base = OTHER; note = 2'-fluoro uridine
  modified_base 61: mod_base = OTHER; note = 2'-fluoro cytidine
  modified_base 62: mod_base = OTHER; note = 2'-fluoro uridine
  modified_base 63: mod_base = OTHER; note = 2'-O-methyl guanosine
  modified_base 64: mod_base = OTHER; note = 2'-O-methyl adenosine
  modified_base 65: mod_base = OTHER; note = 2'-O-methyl adenosine
  modified_base 66: mod_base = OTHER; note = 2'-O-methyl adenosine
  modified_base 67: mod_base = OTHER; note = 2'-fluoro adenosine
  modified_base 68: mod_base = OTHER; note = 2'-fluoro guanosine
  modified_base 83: mod_base = OTHER; note = 2'-O-methyl uridine
  modified_base 84: mod_base = OTHER; note = 2'-O-methyl cytidine
  modified_base 85: mod_base = OTHER; note = 2'-fluoro uridine
  modified_base 86: mod_base = OTHER; note = 2'-fluoro guanosine
  modified_base 89: mod_base = OTHER; note = 2'-O-methyl uridine
  modified_base 90: mod_base = OTHER; note = 2'-O-methyl uridine
  modified_base 91: mod_base = OTHER; note = 2'-O-methyl cytidine
  modified_base 92: mod_base = OTHER; note = 2'-O-methyl uridine
  modified_base 98: mod_base = OTHER; note = 2'-fluoro cytidine
  modified_base 99: mod_base = OTHER; note = 2'-fluoro guanosine
  modified_base 100: mod_base = OTHER; note = 2'-fluoro uridine phosphorothioate
  modified_base 101: mod_base = OTHER; note = 2'-fluoro uridine phosphorothioate
  modified_base 102: mod_base = OTHER; note = 2'-O-methyl uridine phosphorothioate
  modified_base 103: mod_base = OTHER; note = 2'-O-methyl adenosine

SEQ ID NO: 448 - RNA, 103 nt, synthetic construct; identical to SEQ ID NO: 436
  source 1..103: mol_type = other RNA
  modified_base 1: mod_base = OTHER; note = 2'-O-methyl cytidine phosphorothioate
  modified_base 2: mod_base = OTHER; note = 2'-O-methyl uridine phosphorothioate
  modified_base 3: mod_base = OTHER; note = 2'-O-methyl guanosine phosphorothioate
  modified_base 4: mod_base = OTHER; note = 2'-O-methyl adenosine
  modified_base 5: mod_base = OTHER; note = 2'-O-methyl adenosine
  modified_base 9: mod_base = OTHER; note = 2'-O-methyl guanosine
  modified_base 10: mod_base = OTHER; note = 2'-O-methyl uridine
  modified_base 11: mod_base = OTHER; note = 2'-O-methyl guanosine
  modified_base 13: mod_base = OTHER; note = 2'-O-methyl cytidine
  modified_base 18: mod_base = OTHER; note = 2'-O-methyl uridine
  modified_base 22: mod_base = OTHER; note = 2'-O-methyl uridine
  modified_base 25: mod_base = OTHER; note = 2'-fluoro guanosine
  modified_base 29: mod_base = OTHER; note = 2'-fluoro uridine
  modified_base 30: mod_base = OTHER; note = 2'-fluoro adenosine
  modified_base 31: mod_base = OTHER; note = 2'-fluoro guanosine
  modified_base 32: mod_base = OTHER; note = 2'-fluoro cytidine
  modified_base 37: mod_base = OTHER; note = 2'-O-methyl guanosine
  modified_base 38: mod_base = OTHER; note = 2'-O-methyl adenosine
  modified_base 39: mod_base = OTHER; note = 2'-O-methyl adenosine
  modified_base 40: mod_base = OTHER; note = 2'-O-methyl adenosine
  modified_base 41: mod_base = OTHER; note = 2'-O-methyl cytidine
  modified_base 43: mod_base = OTHER; note = 2'-O-methyl uridine
  modified_base 45: mod_base = OTHER; note = 2'-fluoro guanosine
  modified_base 46: mod_base = OTHER; note = 2'-fluoro cytidine
  modified_base 48: mod_base = OTHER; note = 2'-fluoro adenosine
  modified_base 49: mod_base = OTHER; note = 2'-fluoro cytidine
  modified_base 57: mod_base = OTHER; note = 2'-O-methyl cytidine
  modified_base 58: mod_base = OTHER; note = 2'-O-methyl cytidine
  modified_base 60: mod_base = OTHER; note = 2'-O-methyl uridine
  modified_base 61: mod_base = OTHER; note = 2'-O-methyl cytidine
  modified_base 62: mod_base = OTHER; note = 2'-O-methyl uridine
  modified_base 63: mod_base = OTHER; note = 2'-O-methyl guanosine
  modified_base 64: mod_base = OTHER; note = 2'-O-methyl adenosine
  modified_base 65: mod_base = OTHER; note = 2'-O-methyl adenosine
  modified_base 66: mod_base = OTHER; note = 2'-O-methyl adenosine
  modified_base 67: mod_base = OTHER; note = 2'-O-methyl adenosine
  modified_base 68: mod_base = OTHER; note = 2'-O-methyl guanosine
  modified_base 83: mod_base = OTHER; note = 2'-O-methyl uridine
  modified_base 84: mod_base = OTHER; note = 2'-O-methyl cytidine
  modified_base 85: mod_base = OTHER; note = 2'-O-methyl uridine
  modified_base 86: mod_base = OTHER; note = 2'-O-methyl guanosine
  modified_base 89: mod_base = OTHER; note = 2'-O-methyl uridine
  modified_base 90: mod_base = OTHER; note = 2'-O-methyl uridine
  modified_base 91: mod_base = OTHER; note = 2'-O-methyl cytidine
  modified_base 92: mod_base = OTHER; note = 2'-O-methyl uridine
  modified_base 98: mod_base = OTHER; note = 2'-O-methyl cytidine
  modified_base 99: mod_base = OTHER; note = 2'-O-methyl guanosine
  modified_base 100: mod_base = OTHER; note = 2'-O-methyl uridine phosphorothioate
  modified_base 101: mod_base = OTHER; note = 2'-O-methyl uridine phosphorothioate
  modified_base 102: mod_base = OTHER; note = 2'-O-methyl uridine phosphorothioate
  modified_base 103: mod_base = OTHER; note = 2'-O-methyl adenosine

SEQ ID NO: 449 - RNA, 103 nt, synthetic construct; identical to SEQ ID NO: 436
  source 1..103: mol_type = other RNA
  modified_base 1: mod_base = OTHER; note = 2'-O-methyl cytidine phosphorothioate
  modified_base 2: mod_base = OTHER; note = 2'-O-methyl uridine phosphorothioate
  modified_base 3: mod_base = OTHER; note = 2'-O-methyl guanosine phosphorothioate
  modified_base 4: mod_base = OTHER; note = 2'-O-methyl adenosine
  modified_base 5: mod_base = OTHER; note = 2'-O-methyl adenosine
  modified_base 9: mod_base = OTHER; note = 2'-O-methyl guanosine
  modified_base 10: mod_base = OTHER; note = 2'-O-methyl uridine
  modified_base 11: mod_base = OTHER; note = 2'-O-methyl guanosine
  modified_base 13: mod_base = OTHER; note = 2'-O-methyl cytidine
  modified_base 18: mod_base = OTHER; note = 2'-O-methyl uridine
  modified_base 22: mod_base = OTHER; note = 2'-O-methyl uridine
  modified_base 25: mod_base = OTHER; note = 2'-fluoro guanosine
  modified_base 29: mod_base = OTHER; note = 2'-fluoro uridine
  modified_base 30: mod_base = OTHER; note = 2'-fluoro adenosine
  modified_base 31: mod_base = OTHER; note = 2'-fluoro guanosine
  modified_base 32: mod_base = OTHER; note = 2'-fluoro cytidine
  modified_base 37: mod_base = OTHER; note = 2'-O-methyl guanosine
  modified_base 38: mod_base = OTHER; note = 2'-O-methyl adenosine
  modified_base 39: mod_base = OTHER; note = 2'-O-methyl adenosine
  modified_base 40: mod_base = OTHER; note = 2'-O-methyl adenosine
  modified_base 41: mod_base = OTHER; note = 2'-O-methyl cytidine
  modified_base 43: mod_base = OTHER; note = 2'-O-methyl uridine
  modified_base 45: mod_base = OTHER; note = 2'-fluoro guanosine
  modified_base 46: mod_base = OTHER; note = 2'-fluoro cytidine
  modified_base 48: mod_base = OTHER; note = 2'-fluoro adenosine
  modified_base 49: mod_base = OTHER; note = 2'-fluoro cytidine
  modified_base 57: mod_base = OTHER; note = 2'-fluoro cytidine
  modified_base 58: mod_base = OTHER; note = 2'-fluoro cytidine
  modified_base 60: mod_base = OTHER; note = 2'-fluoro uridine
  modified_base 61: mod_base = OTHER; note = 2'-fluoro cytidine
  modified_base 62: mod_base = OTHER; note = 2'-fluoro uridine
  modified_base 63: mod_base = OTHER; note = 2'-O-methyl guanosine
  modified_base 64: mod_base = OTHER; note = 2'-O-methyl adenosine
  modified_base 65: mod_base = OTHER; note = 2'-O-methyl adenosine
  modified_base 66: mod_base = OTHER; note = 2'-O-methyl adenosine
  modified_base 67: mod_base = OTHER; note = 2'-fluoro adenosine
  modified_base 68: mod_base = OTHER; note = 2'-fluoro guanosine
  modified_base 83: mod_base = OTHER; note = 2'-O-methyl uridine
  modified_base 84: mod_base = OTHER; note = 2'-O-methyl cytidine
  modified_base 85: mod_base = OTHER; note = 2'-fluoro uridine
  modified_base 86: mod_base = OTHER; note = 2'-fluoro guanosine
  modified_base 89: mod_base = OTHER; note = 2'-O-methyl uridine
  modified_base 90: mod_base = OTHER; note = 2'-O-methyl uridine
  modified_base 91: mod_base = OTHER; note = 2'-O-methyl cytidine
  modified_base 92: mod_base = OTHER; note = 2'-O-methyl uridine
  modified_base 98: mod_base = OTHER; note = 2'-fluoro cytidine
  modified_base 99: mod_base = OTHER; note = 2'-fluoro guanosine
  modified_base 100: mod_base = OTHER; note = 2'-fluoro uridine phosphorothioate
  modified_base 101: mod_base = OTHER; note = 2'-fluoro uridine phosphorothioate
  modified_base 102: mod_base = OTHER; note = 2'-O-methyl uridine phosphorothioate
  modified_base 103: mod_base = OTHER; note = 2'-O-methyl adenosine

SEQ ID NO: 450 - RNA, 121 nt, synthetic construct
  source 1..121: mol_type = other RNA
  modified_base 1: mod_base = OTHER; note = 2'-O-methyl cytidine phosphorothioate
  modified_base 2: mod_base = OTHER; note = 2'-O-methyl uridine phosphorothioate
  modified_base 3: mod_base = OTHER; note = 2'-O-methyl guanosine phosphorothioate
  modified_base 119: mod_base = OTHER; note = 2'-O-methyl uridine phosphorothioate
  modified_base 120: mod_base = OTHER; note = 2'-O-methyl uridine phosphorothioate
  modified_base 121: mod_base = OTHER; note = 2'-O-methyl adenosine
ctgaacttgtggccgtttacgtcggttgtagctcccgaaacgttgctacaataaggccgtctgaaaagatgtgccgcaacgctctgccccttaaagctcctgctttaaggggcatcgttta

SEQ ID NO: 451 - RNA, 121 nt, synthetic construct; identical to SEQ ID NO: 450
  source 1..121: mol_type = other RNA
  modified_base 1: mod_base = OTHER; note = 2'-O-methyl cytidine phosphorothioate
  modified_base 2: mod_base = OTHER; note = 2'-O-methyl uridine phosphorothioate
  modified_base 3: mod_base = OTHER; note = 2'-O-methyl guanosine phosphorothioate
  modified_base 4: mod_base = OTHER; note = 2'-O-methyl adenosine
  modified_base 5: mod_base = OTHER; note = 2'-O-methyl adenosine
  modified_base 37: mod_base = OTHER; note = 2'-O-methyl guanosine
  modified_base 38: mod_base = OTHER; note = 2'-O-methyl adenosine
  modified_base 39: mod_base = OTHER; note = 2'-O-methyl adenosine
  modified_base 40: mod_base = OTHER; note = 2'-O-methyl adenosine
  modified_base 60: mod_base = OTHER; note = 2'-O-methyl uridine
  modified_base 61: mod_base = OTHER; note = 2'-O-methyl cytidine
  modified_base 62: mod_base = OTHER; note = 2'-O-methyl uridine
  modified_base 63: mod_base = OTHER; note = 2'-O-methyl guanosine
  modified_base 64: mod_base = OTHER; note = 2'-O-methyl adenosine
  modified_base 65: mod_base = OTHER; note = 2'-O-methyl adenosine
  modified_base 66: mod_base = OTHER; note = 2'-O-methyl adenosine
  modified_base 67: mod_base = OTHER; note = 2'-O-methyl adenosine
  modified_base 68: mod_base = OTHER; note = 2'-O-methyl guanosine
  modified_base 89: mod_base = OTHER; note = 2'-O-methyl cytidine
  modified_base 90: mod_base = OTHER; note = 2'-O-methyl cytidine
  modified_base 91: mod_base = OTHER; note = 2'-O-methyl uridine
  modified_base 92: mod_base = OTHER; note = 2'-O-methyl uridine
  modified_base 93: mod_base = OTHER; note = 2'-O-methyl adenosine
  modified_base 94: mod_base = OTHER; note = 2'-O-methyl adenosine
  modified_base 95: mod_base = OTHER; note = 2'-O-methyl adenosine
  modified_base 96: mod_base = OTHER; note = 2'-O-methyl guanosine
  modified_base 97: mod_base = OTHER; note = 2'-O-methyl cytidine
  modified_base 98: mod_base = OTHER; note = 2'-O-methyl uridine
  modified_base 99: mod_base = OTHER; note = 2'-O-methyl cytidine
  modified_base 100: mod_base = OTHER; note = 2'-O-methyl cytidine
  modified_base 101: mod_base = OTHER; note = 2'-O-methyl uridine
  modified_base 102: mod_base = OTHER; note = 2'-O-methyl guanosine
  modified_base 103: mod_base = OTHER; note = 2'-O-methyl cytidine
  modified_base 104: mod_base = OTHER; note = 2'-O-methyl uridine
  modified_base 105: mod_base = OTHER; note = 2'-O-methyl uridine
  modified_base 106: mod_base = OTHER; note = 2'-O-methyl uridine
  modified_base 107: mod_base = OTHER; note = 2'-O-methyl adenosine
  modified_base 108: mod_base = OTHER; note = 2'-O-methyl adenosine
  modified_base 109: mod_base = OTHER; note = 2'-O-methyl guanosine
  modified_base 110: mod_base = OTHER; note = 2'-O-methyl guanosine
  modified_base 116: mod_base = OTHER; note = 2'-O-methyl cytidine
  modified_base 117: mod_base = OTHER; note = 2'-O-methyl guanosine
  modified_base 118: mod_base = OTHER; note = 2'-O-methyl uridine phosphorothioate
  modified_base 119: mod_base = OTHER; note = 2'-O-methyl uridine phosphorothioate
  modified_base 120: mod_base = OTHER; note = 2'-O-methyl uridine phosphorothioate
  modified_base 121: mod_base = OTHER; note = 2'-O-methyl adenosine

SEQ ID NO: 452 - RNA, 121 nt, synthetic construct; identical to SEQ ID NO: 450
  source 1..121: mol_type = other RNA
  modified_base 1: mod_base = OTHER; note = 2'-O-methyl cytidine phosphorothioate
  modified_base 2: mod_base = OTHER; note = 2'-O-methyl uridine phosphorothioate
  modified_base 3: mod_base = OTHER; note = 2'-O-methyl guanosine phosphorothioate
  modified_base 4: mod_base = OTHER; note = 2'-O-methyl adenosine
  modified_base 5: mod_base = OTHER; note = 2'-O-methyl adenosine
  modified_base 9: mod_base = OTHER; note = 2'-O-methyl guanosine
  modified_base 10: mod_base = OTHER; note = 2'-O-methyl uridine
  modified_base 11: mod_base = OTHER; note = 2'-O-methyl guanosine
  modified_base 13: mod_base = OTHER; note = 2'-O-methyl cytidine
  modified_base 18: mod_base = OTHER; note = 2'-O-methyl uridine
  modified_base 22: mod_base = OTHER; note = 2'-O-methyl uridine
  modified_base 25: mod_base = OTHER; note = 2'-O-methyl guanosine
  modified_base 29: mod_base = OTHER; note = 2'-O-methyl uridine
  modified_base 30: mod_base = OTHER; note = 2'-O-methyl adenosine
  modified_base 31: mod_base = OTHER; note = 2'-O-methyl guanosine
  modified_base 32: mod_base = OTHER; note = 2'-O-methyl cytidine
  modified_base 37: mod_base = OTHER; note = 2'-O-methyl guanosine
  modified_base 38: mod_base = OTHER; note = 2'-O-methyl adenosine
  modified_base 39: mod_base = OTHER; note = 2'-O-methyl adenosine
  modified_base 40: mod_base = OTHER; note = 2'-O-methyl adenosine
  modified_base 60: mod_base = OTHER; note = 2'-O-methyl uridine
  modified_base 61: mod_base = OTHER; note = 2'-O-methyl cytidine
  modified_base 62: mod_base = OTHER; note = 2'-O-methyl uridine
  modified_base 63: mod_base = OTHER; note = 2'-O-methyl guanosine
  modified_base 64: mod_base = OTHER; note = 2'-O-methyl adenosine
  modified_base 65: mod_base = OTHER; note = 2'-O-methyl adenosine
  modified_base 66: mod_base = OTHER; note = 2'-O-methyl adenosine
  modified_base 67: mod_base = OTHER; note = 2'-O-methyl adenosine
  modified_base 68: mod_base = OTHER; note = 2'-O-methyl guanosine
  modified_base 89: mod_base = OTHER; note = 2'-O-methyl cytidine
  modified_base 90: mod_base = OTHER; note = 2'-O-methyl cytidine
  modified_base 91: mod_base = OTHER; note = 2'-O-methyl uridine
  modified_base 92: mod_base = OTHER; note = 2'-O-methyl uridine
  modified_base 93: mod_base = OTHER; note = 2'-O-methyl adenosine
  modified_base 94: mod_base = OTHER; note = 2'-O-methyl adenosine
  modified_base 95: mod_base = OTHER; note = 2'-O-methyl adenosine
  modified_base 96: mod_base = OTHER; note = 2'-O-methyl guanosine
  modified_base 97: mod_base = OTHER; note = 2'-O-methyl cytidine
  modified_base 98: mod_base = OTHER; note = 2'-O-methyl uridine
  modified_base 99: mod_base = OTHER; note = 2'-O-methyl cytidine
  modified_base 100: mod_base = OTHER; note = 2'-O-methyl cytidine
  modified_base 101: mod_base = OTHER; note = 2'-O-methyl uridine
  modified_base 102: mod_base = OTHER; note = 2'-O-methyl guanosine
  modified_base 103: mod_base = OTHER; note = 2'-O-methyl cytidine
  modified_base 104: mod_base = OTHER; note = 2'-O-methyl uridine
  modified_base 105: mod_base = OTHER; note = 2'-O-methyl uridine
  modified_base 106: mod_base = OTHER; note = 2'-O-methyl uridine
  modified_base 107: mod_base = OTHER; note = 2'-O-methyl adenosine
  modified_base 108: mod_base = OTHER; note = 2'-O-methyl adenosine
  modified_base 109: mod_base = OTHER; note = 2'-O-methyl guanosine
  modified_base 110: mod_base = OTHER; note = 2'-O-methyl guanosine
  modified_base 116: mod_base = OTHER; note = 2'-O-methyl cytidine
  modified_base 117: mod_base = OTHER; note = 2'-O-methyl guanosine
  modified_base 118: mod_base = OTHER; note = 2'-O-methyl uridine phosphorothioate
  modified_base 119: mod_base = OTHER; note = 2'-O-methyl uridine phosphorothioate
  modified_base 120: mod_base = OTHER; note = 2'-O-methyl uridine phosphorothioate
  modified_base 121: mod_base = OTHER; note = 2'-O-methyl adenosine

SEQ ID NO: 453 - RNA, 121 nt, synthetic construct; identical to SEQ ID NO: 450
  source 1..121: mol_type = other RNA
  modified_base 1: mod_base = OTHER; note = 2'-O-methyl cytidine phosphorothioate
  modified_base 2: mod_base = OTHER; note = 2'-O-methyl uridine phosphorothioate
  modified_base 3: mod_base = OTHER; note = 2'-O-methyl guanosine phosphorothioate
  modified_base 4: mod_base = OTHER; note = 2'-O-methyl adenosine
  modified_base 5: mod_base = OTHER; note = 2'-O-methyl adenosine
  modified_base 6: mod_base = OTHER; note = 2'-O-methyl cytidine
  modified_base 7: mod_base = OTHER; note = 2'-O-methyl uridine
  modified_base 8: mod_base = OTHER; note = 2'-O-methyl uridine
  modified_base 9: mod_base = OTHER; note = 2'-O-methyl guanosine
  modified_base 10: mod_base = OTHER; note = 2'-O-methyl uridine
  modified_base 11: mod_base = OTHER; note = 2'-O-methyl guanosine
  modified_base 12: mod_base = OTHER; note = 2'-O-methyl guanosine
  modified_base 13: mod_base = OTHER; note = 2'-O-methyl cytidine
  modified_base 14: mod_base = OTHER; note = 2'-O-methyl cytidine
  modified_base 18: mod_base = OTHER; note = 2'-O-methyl uridine
  modified_base 22: mod_base = OTHER; note = 2'-O-methyl uridine
  modified_base 25: mod_base = OTHER; note = 2'-O-methyl guanosine
  modified_base 29: mod_base = OTHER; note = 2'-O-methyl uridine
  modified_base 30: mod_base = OTHER; note = 2'-O-methyl adenosine
  modified_base 31: mod_base = OTHER; note = 2'-O-methyl guanosine
  modified_base 32: mod_base = OTHER; note = 2'-O-methyl cytidine
  modified_base 37: mod_base = OTHER; note = 2'-O-methyl guanosine
  modified_base 38: mod_base = OTHER; note = 2'-O-methyl adenosine
  modified_base 39: mod_base = OTHER; note = 2'-O-methyl adenosine
  modified_base 40: mod_base = OTHER; note = 2'-O-methyl adenosine
  modified_base 60: mod_base = OTHER; note = 2'-O-methyl uridine
  modified_base 61: mod_base = OTHER; note = 2'-O-methyl cytidine
  modified_base 62: mod_base = OTHER; note = 2'-O-methyl uridine
  modified_base 63: mod_base = OTHER; note = 2'-O-methyl guanosine
  modified_base 64: mod_base = OTHER; note = 2'-O-methyl adenosine
  modified_base 65: mod_base = OTHER; note = 2'-O-methyl adenosine
  modified_base 66: mod_base = OTHER; note = 2'-O-methyl adenosine
  modified_base 67: mod_base = OTHER; note = 2'-O-methyl adenosine
  modified_base 68: mod_base = OTHER; note = 2'-O-methyl guanosine
  modified_base 89: mod_base = OTHER; note = 2'-O-methyl cytidine
  modified_base 90: mod_base = OTHER; note = 2'-O-methyl cytidine
  modified_base 91: mod_base = OTHER; note = 2'-O-methyl uridine
  modified_base 92: mod_base = OTHER; note = 2'-O-methyl uridine
  modified_base 93: mod_base = OTHER; note = 2'-O-methyl adenosine
  modified_base 94: mod_base = OTHER; note = 2'-O-methyl adenosine
  modified_base 95: mod_base = OTHER; note = 2'-O-methyl adenosine
  modified_base 96: mod_base = OTHER; note = 2'-O-methyl guanosine
  modified_base 97: mod_base = OTHER; note = 2'-O-methyl cytidine
  modified_base 98: mod_base = OTHER; note = 2'-O-methyl uridine
  modified_base 99: mod_base = OTHER; note = 2'-O-methyl cytidine
  modified_base 100: mod_base = OTHER; note = 2'-O-methyl cytidine
  modified_base 101: mod_base = OTHER; note = 2'-O-methyl uridine
  modified_base 102: mod_base = OTHER; note = 2'-O-methyl guanosine
  modified_base 103: mod_base = OTHER; note = 2'-O-methyl cytidine
  modified_base 104: mod_base = OTHER; note = 2'-O-methyl uridine
  modified_base 105: mod_base = OTHER; note = 2'-O-methyl uridine
  modified_base 106: mod_base = OTHER; note = 2'-O-methyl uridine
  modified_base 107: mod_base = OTHER; note = 2'-O-methyl adenosine
  modified_base 108: mod_base = OTHER; note = 2'-O-methyl adenosine
  modified_base 109: mod_base = OTHER; note = 2'-O-methyl guanosine
  modified_base 110: mod_base = OTHER; note = 2'-O-methyl guanosine
  modified_base 116: mod_base = OTHER; note = 2'-O-methyl cytidine
  modified_base 117: mod_base = OTHER; note = 2'-O-methyl guanosine
  modified_base 118: mod_base = OTHER; note = 2'-O-methyl uridine phosphorothioate
  modified_base 119: mod_base = OTHER; note = 2'-O-methyl uridine phosphorothioate
  modified_base 120: mod_base = OTHER; note = 2'-O-methyl uridine phosphorothioate
  modified_base 121: mod_base = OTHER; note = 2'-O-methyl adenosine

SEQ ID NO: 454 - RNA, 121 nt, synthetic construct
  source 1..121: mol_type = other RNA
  modified_base 1: mod_base = OTHER; note = 2'-O-methyl cytidine phosphorothioate
  modified_base 2: mod_base = OTHER; note = 2'-O-methyl cytidine phosphorothioate
  modified_base 3: mod_base = OTHER; note = 2'-O-methyl guanosine phosphorothioate
  modified_base 119: mod_base = OTHER; note = 2'-O-methyl uridine phosphorothioate
  modified_base 120: mod_base = OTHER; note = 2'-O-methyl uridine phosphorothioate
  modified_base 121: mod_base = OTHER; note = 2'-O-methyl adenosine
ccgcaaagctgcatccaccccccggttgtagctcccgaaacgttgctacaataaggccgtctgaaaagatgtgccgcaacgctctgccccttaaagctcctgctttaaggggcatcgttta

SEQ ID NO: 455 - RNA, 121 nt, synthetic construct; identical to SEQ ID NO: 454
  source 1..121: mol_type = other RNA
  modified_base 1: mod_base = OTHER; note = 2'-O-methyl cytidine phosphorothioate
  modified_base 2: mod_base = OTHER; note = 2'-O-methyl cytidine phosphorothioate
  modified_base 3: mod_base = OTHER; note = 2'-O-methyl guanosine phosphorothioate
  modified_base 4: mod_base = OTHER; note = 2'-O-methyl cytidine
  modified_base 5: mod_base = OTHER; note = 2'-O-methyl adenosine
  modified_base 37: mod_base = OTHER; note = 2'-O-methyl guanosine
  modified_base 38: mod_base = OTHER; note = 2'-O-methyl adenosine
  modified_base 39: mod_base = OTHER; note = 2'-O-methyl adenosine
  modified_base 40: mod_base = OTHER; note = 2'-O-methyl adenosine
  modified_base 60: mod_base = OTHER; note = 2'-O-methyl uridine
  modified_base 61: mod_base = OTHER; note = 2'-O-methyl cytidine
  modified_base 62: mod_base = OTHER; note = 2'-O-methyl uridine
  modified_base 63: mod_base = OTHER; note = 2'-O-methyl guanosine
  modified_base 64: mod_base = OTHER; note = 2'-O-methyl adenosine
  modified_base 65: mod_base = OTHER; note = 2'-O-methyl adenosine
  modified_base 66: mod_base = OTHER; note = 2'-O-methyl adenosine
  modified_base 67: mod_base = OTHER; note = 2'-O-methyl adenosine
  modified_base 68: mod_base = OTHER; note = 2'-O-methyl guanosine
  modified_base 89: mod_base = OTHER; note = 2'-O-methyl cytidine
  modified_base 90: mod_base = OTHER; note = 2'-O-methyl cytidine
  modified_base 91: mod_base = OTHER; note = 2'-O-methyl uridine
  modified_base 92: mod_base = OTHER; note = 2'-O-methyl uridine
  modified_base 93: mod_base = OTHER; note = 2'-O-methyl adenosine
  modified_base 94: mod_base = OTHER; note = 2'-O-methyl adenosine
  modified_base 95: mod_base = OTHER; note = 2'-O-methyl adenosine
  modified_base 96: mod_base = OTHER; note = 2'-O-methyl guanosine
  modified_base 97: mod_base = OTHER; note = 2'-O-methyl cytidine
  modified_base 98: mod_base = OTHER; note = 2'-O-methyl uridine
  modified_base 99: mod_base = OTHER; note = 2'-O-methyl cytidine
  modified_base 100: mod_base = OTHER; note = 2'-O-methyl cytidine
  modified_base 101: mod_base = OTHER; note = 2'-O-methyl uridine
  modified_base 102: mod_base = OTHER; note = 2'-O-methyl guanosine
  modified_base 103: mod_base = OTHER; note = 2'-O-methyl cytidine
  modified_base 104: mod_base = OTHER; note = 2'-O-methyl uridine
  modified_base 105: mod_base = OTHER; note = 2'-O-methyl uridine
  modified_base 106: mod_base = OTHER; note = 2'-O-methyl uridine
  modified_base 107: mod_base = OTHER; note = 2'-O-methyl adenosine
  modified_base 108: mod_base = OTHER; note = 2'-O-methyl adenosine
  modified_base 109: mod_base = OTHER; note = 2'-O-methyl guanosine
  modified_base 110: mod_base = OTHER; note = 2'-O-methyl guanosine
  modified_base 116: mod_base = OTHER; note = 2'-O-methyl cytidine
  modified_base 117: mod_base = OTHER; note = 2'-O-methyl guanosine
  modified_base 118: mod_base = OTHER; note = 2'-O-methyl uridine phosphorothioate
  modified_base 119: mod_base = OTHER; note = 2'-O-methyl uridine phosphorothioate
  modified_base 120: mod_base = OTHER; note = 2'-O-methyl uridine phosphorothioate
  modified_base 121: mod_base = OTHER; note = 2'-O-methyl adenosine

SEQ ID NO: 456 - RNA, 121 nt, synthetic construct; identical to SEQ ID NO: 454
  source 1..121: mol_type = other RNA
  modified_base 1: mod_base = OTHER; note = 2'-O-methyl cytidine phosphorothioate
  modified_base 2: mod_base = OTHER; note = 2'-O-methyl cytidine phosphorothioate
  modified_base 3: mod_base = OTHER; note = 2'-O-methyl guanosine phosphorothioate
  modified_base 4: mod_base = OTHER; note = 2'-O-methyl cytidine
  modified_base 5: mod_base = OTHER; note = 2'-O-methyl adenosine
  modified_base 9: mod_base = OTHER; note = 2'-O-methyl cytidine
  modified_base 10: mod_base = OTHER; note = 2'-O-methyl uridine
  modified_base 11: mod_base = OTHER; note = 2'-O-methyl guanosine
  modified_base 13: mod_base = OTHER; note = 2'-O-methyl adenosine
  modified_base 18: mod_base = OTHER; note = 2'-O-methyl cytidine
  modified_base 22: mod_base = OTHER; note = 2'-O-methyl cytidine
  modified_base 25: mod_base = OTHER; note = 2'-O-methyl guanosine
  modified_base 29: mod_base = OTHER; note = 2'-O-methyl uridine
  modified_base 30: mod_base = OTHER; note = 2'-O-methyl adenosine
  modified_base 31: mod_base = OTHER; note = 2'-O-methyl guanosine
  modified_base 32: mod_base = OTHER; note = 2'-O-methyl cytidine
  modified_base 37: mod_base = OTHER; note = 2'-O-methyl guanosine
  modified_base 38: mod_base = OTHER; note = 2'-O-methyl adenosine
  modified_base 39: mod_base = OTHER; note = 2'-O-methyl adenosine
  modified_base 40: mod_base = OTHER; note = 2'-O-methyl adenosine
  modified_base 60: mod_base = OTHER; note = 2'-O-methyl uridine
  modified_base 61: mod_base = OTHER; note = 2'-O-methyl cytidine
  modified_base 62: mod_base = OTHER; note = 2'-O-methyl uridine
  modified_base 63: mod_base = OTHER; note = 2'-O-methyl guanosine
  modified_base 64: mod_base = OTHER; note = 2'-O-methyl adenosine
  modified_base 65: mod_base = OTHER; note = 2'-O-methyl adenosine
  modified_base 66: mod_base = OTHER; note = 2'-O-methyl adenosine
  modified_base 67: mod_base = OTHER; note = 2'-O-methyl adenosine
  modified_base 68: mod_base = OTHER; note = 2'-O-methyl guanosine
  modified_base 89: mod_base = OTHER; note = 2'-O-methyl cytidine
  modified_base 90: mod_base = OTHER; note = 2'-O-methyl cytidine
  modified_base 91: mod_base = OTHER; note = 2'-O-methyl uridine
  modified_base 92: mod_base = OTHER; note = 2'-O-methyl uridine
  modified_base 93: mod_base = OTHER; note = 2'-O-methyl adenosine
  modified_base 94: mod_base = OTHER; note = 2'-O-methyl adenosine
  modified_base 95: mod_base = OTHER; note = 2'-O-methyl adenosine
  modified_base 96: mod_base = OTHER; note = 2'-O-methyl guanosine
  modified_base 97: mod_base = OTHER; note = 2'-O-methyl cytidine
  modified_base 98: mod_base = OTHER; note = 2'-O-methyl uridine
  modified_base 99: mod_base = OTHER; note = 2'-O-methyl cytidine
  modified_base 100: mod_base = OTHER; note = 2'-O-methyl cytidine
  modified_base 101: mod_base = OTHER; note = 2'-O-methyl uridine
  modified_base 102: mod_base = OTHER; note = 2'-O-methyl guanosine
  modified_base 103: mod_base = OTHER; note = 2'-O-methyl cytidine
  modified_base 104: mod_base = OTHER; note = 2'-O-methyl uridine
  modified_base 105: mod_base = OTHER; note = 2'-O-methyl uridine
  modified_base 106: mod_base = OTHER; note = 2'-O-methyl uridine
  modified_base 107: mod_base = OTHER; note = 2'-O-methyl adenosine
  modified_base 108: mod_base = OTHER; note = 2'-O-methyl adenosine
  modified_base 109: mod_base = OTHER; note = 2'-O-methyl guanosine
  modified_base 110: mod_base = OTHER; note = 2'-O-methyl guanosine
  modified_base 116: mod_base = OTHER; note = 2'-O-methyl cytidine
  modified_base 117: mod_base = OTHER; note = 2'-O-methyl guanosine
  modified_base 118: mod_base = OTHER; note = 2'-O-methyl uridine phosphorothioate
  modified_base 119: mod_base = OTHER; note = 2'-O-methyl uridine phosphorothioate
  modified_base 120: mod_base = OTHER; note = 2'-O-methyl uridine phosphorothioate
  modified_base 121: mod_base = OTHER; note = 2'-O-methyl adenosine

SEQ ID NO: 457 - RNA, 121 nt, synthetic construct; identical to SEQ ID NO: 454
  source 1..121: mol_type = other RNA
  modified_base 1: mod_base = OTHER; note = 2'-O-methyl cytidine phosphorothioate
  modified_base 2: mod_base = OTHER; note = 2'-O-methyl cytidine phosphorothioate
  modified_base 3: mod_base = OTHER; note = 2'-O-methyl guanosine phosphorothioate
  modified_base 4: mod_base = OTHER; note = 2'-O-methyl cytidine
  modified_base 5: mod_base = OTHER; note = 2'-O-methyl adenosine
  modified_base 6: mod_base = OTHER; note = 2'-O-methyl adenosine
  modified_base 7: mod_base = OTHER; note = 2'-O-methyl adenosine
  modified_base 8: mod_base = OTHER; note = 2'-O-methyl guanosine
  modified_base 9: mod_base = OTHER; note = 2'-O-methyl cytidine
  modified_base 10: mod_base = OTHER; note = 2'-O-methyl uridine
  modified_base 11: mod_base = OTHER; note = 2'-O-methyl guanosine
  modified_base 12: mod_base = OTHER; note = 2'-O-methyl cytidine
  modified_base 13: mod_base = OTHER; note = 2'-O-methyl adenosine
  modified_base 14: mod_base = OTHER; note = 2'-O-methyl uridine
  modified_base 18: mod_base = OTHER; note = 2'-O-methyl cytidine
  modified_base 22: mod_base = OTHER; note = 2'-O-methyl cytidine
  modified_base 25: mod_base = OTHER; note = 2'-O-methyl guanosine
  modified_base 29: mod_base = OTHER; note = 2'-O-methyl uridine
  modified_base 30: mod_base = OTHER; note = 2'-O-methyl adenosine
  modified_base 31: mod_base = OTHER; note = 2'-O-methyl guanosine
  modified_base 32: mod_base = OTHER; note = 2'-O-methyl cytidine
  modified_base 37: mod_base = OTHER; note = 2'-O-methyl guanosine
  modified_base 38: mod_base = OTHER; note = 2'-O-methyl adenosine
  modified_base 39: mod_base = OTHER; note = 2'-O-methyl adenosine
  modified_base 40: mod_base = OTHER; note = 2'-O-methyl adenosine
  modified_base 60: mod_base = OTHER; note = 2'-O-methyl uridine
  modified_base 61: mod_base = OTHER; note = 2'-O-methyl cytidine
  modified_base 62: mod_base = OTHER; note = 2'-O-methyl uridine
  modified_base 63: mod_base = OTHER; note = 2'-O-methyl guanosine
  modified_base 64: mod_base = OTHER; note = 2'-O-methyl adenosine
  modified_base 65: mod_base = OTHER; note = 2'-O-methyl adenosine
  modified_base 66: mod_base = OTHER; note = 2'-O-methyl adenosine
  modified_base 67: mod_base = OTHER; note = 2'-O-methyl adenosine
  modified_base 68: mod_base = OTHER; note = 2'-O-methyl guanosine
  modified_base 89: mod_base = OTHER; note = 2'-O-methyl cytidine
  modified_base 90: mod_base = OTHER; note = 2'-O-methyl cytidine
  modified_base 91: mod_base = OTHER; note = 2'-O-methyl uridine
  modified_base 92: mod_base = OTHER; note = 2'-O-methyl uridine
  modified_base 93: mod_base = OTHER; note = 2'-O-methyl adenosine
  modified_base 94: mod_base = OTHER; note = 2'-O-methyl adenosine
  modified_base 95: mod_base = OTHER; note = 2'-O-methyl adenosine
  modified_base 96: mod_base = OTHER; note = 2'-O-methyl guanosine
  modified_base 97: mod_base = OTHER; note = 2'-O-methyl cytidine
  modified_base 98: mod_base = OTHER; note = 2'-O-methyl uridine
  modified_base 99: mod_base = OTHER; note = 2'-O-methyl cytidine
  modified_base 100: mod_base = OTHER; note = 2'-O-methyl cytidine
  modified_base 101: mod_base = OTHER; note = 2'-O-methyl uridine
  modified_base 102: mod_base = OTHER; note = 2'-O-methyl guanosine
  modified_base 103: mod_base = OTHER; note = 2'-O-methyl cytidine
  modified_base 104: mod_base = OTHER; note = 2'-O-methyl uridine
  modified_base 105: mod_base = OTHER; note = 2'-O-methyl uridine
  modified_base 106: mod_base = OTHER; note = 2'-O-methyl uridine
  modified_base 107: mod_base = OTHER; note = 2'-O-methyl adenosine
  modified_base 108: mod_base = OTHER; note = 2'-O-methyl adenosine
  modified_base 109: mod_base = OTHER; note = 2'-O-methyl guanosine
  modified_base 110: mod_base = OTHER; note = 2'-O-methyl guanosine
  modified_base 116: mod_base = OTHER; note = 2'-O-methyl cytidine
  modified_base 117: mod_base = OTHER; note = 2'-O-methyl guanosine
  modified_base 118: mod_base = OTHER; note = 2'-O-methyl uridine phosphorothioate
  modified_base 119: mod_base = OTHER; note = 2'-O-methyl uridine phosphorothioate
  modified_base 120: mod_base = OTHER; note = 2'-O-methyl uridine phosphorothioate
  modified_base 121: mod_base = OTHER; note = 2'-O-methyl adenosine

SEQ ID NO: 458 - RNA, 121 nt, synthetic construct
  source 1..121: mol_type = other RNA
  modified_base 1: mod_base = OTHER; note = 2'-O-methyl uridine phosphorothioate
  modified_base 2: mod_base = OTHER; note = 2'-O-methyl adenosine phosphorothioate
  modified_base 3: mod_base = OTHER; note = 2'-O-methyl uridine phosphorothioate
  modified_base 119: mod_base = OTHER; note = 2'-O-methyl uridine phosphorothioate
  modified_base 120: mod_base = OTHER; note = 2'-O-methyl uridine phosphorothioate
  modified_base 121: mod_base = OTHER; note = 2'-O-methyl adenosine
tatgttccagcttcctgggtctgcgttgtagctcccgaaacgttgctacaataaggccgtctgaaaagatgtgccgcaacgctctgccccttaaagctcctgctttaaggggcatcgttta

SEQ ID NO: 459 - RNA, 121 nt, synthetic construct; identical to SEQ ID NO: 458
  source 1..121: mol_type = other RNA
  modified_base 1: mod_base = OTHER; note = 2'-O-methyl uridine phosphorothioate
  modified_base 2: mod_base = OTHER; note = 2'-O-methyl adenosine phosphorothioate
  modified_base 3: mod_base = OTHER; note = 2'-O-methyl uridine phosphorothioate
  modified_base 4: mod_base = OTHER; note = 2'-O-methyl guanosine
  modified_base 5: mod_base = OTHER; note = 2'-O-methyl uridine
  modified_base 37: mod_base = OTHER; note = 2'-O-methyl guanosine
  modified_base 38: mod_base = OTHER; note = 2'-O-methyl adenosine
  modified_base 39: mod_base = OTHER; note = 2'-O-methyl adenosine
  modified_base 40: mod_base = OTHER; note = 2'-O-methyl adenosine
  modified_base 60: mod_base = OTHER; note = 2'-O-methyl uridine
  modified_base 61: mod_base = OTHER; note = 2'-O-methyl cytidine
  modified_base 62: mod_base = OTHER; note = 2'-O-methyl uridine
  modified_base 63: mod_base = OTHER; note = 2'-O-methyl guanosine
  modified_base 64: mod_base = OTHER; note = 2'-O-methyl adenosine
  modified_base 65: mod_base = OTHER; note = 2'-O-methyl adenosine
  modified_base 66: mod_base = OTHER; note = 2'-O-methyl adenosine
  modified_base 67: mod_base = OTHER; note = 2'-O-methyl adenosine
  modified_base 68: mod_base = OTHER; note = 2'-O-methyl guanosine
  modified_base 89: mod_base = OTHER; note = 2'-O-methyl cytidine
  modified_base 90: mod_base = OTHER; note = 2'-O-methyl cytidine
  modified_base 91: mod_base = OTHER; note = 2'-O-methyl uridine
  modified_base 92: mod_base = OTHER; note = 2'-O-methyl uridine
  modified_base 93: mod_base = OTHER; note = 2'-O-methyl adenosine
  modified_base 94: mod_base = OTHER; note = 2'-O-methyl adenosine
  modified_base 95: mod_base = OTHER; note = 2'-O-methyl adenosine
  modified_base 96: mod_base = OTHER; note = 2'-O-methyl guanosine
  modified_base 97: mod_base = OTHER; note = 2'-O-methyl cytidine
  modified_base 98: mod_base = OTHER; note = 2'-O-methyl uridine
  modified_base 99: mod_base = OTHER; note = 2'-O-methyl cytidine
  modified_base 100: mod_base = OTHER; note = 2'-O-methyl cytidine
  modified_base 101: mod_base = OTHER; note = 2'-O-methyl uridine
  modified_base 102: mod_base = OTHER; note = 2'-O-methyl guanosine
  modified_base 103: mod_base = OTHER; note = 2'-O-methyl cytidine
  modified_base 104: mod_base = OTHER; note = 2'-O-methyl uridine
  modified_base 105: mod_base = OTHER; note = 2'-O-methyl uridine
  modified_base 106: mod_base = OTHER; note = 2'-O-methyl uridine
  modified_base 107: mod_base = OTHER; note = 2'-O-methyl adenosine
  modified_base 108: mod_base = OTHER; note = 2'-O-methyl adenosine
  modified_base 109: mod_base = OTHER; note = 2'-O-methyl guanosine
  modified_base 110: mod_base = OTHER; note = 2'-O-methyl guanosine
  modified_base 116: mod_base = OTHER; note = 2'-O-methyl cytidine
  modified_base 117: mod_base = OTHER; note = 2'-O-methyl guanosine
  modified_base 118: mod_base = OTHER; note = 2'-O-methyl uridine phosphorothioate
  modified_base 119: mod_base = OTHER; note = 2'-O-methyl uridine phosphorothioate
  modified_base 120: mod_base = OTHER; note = 2'-O-methyl uridine phosphorothioate
  modified_base 121: mod_base = OTHER; note = 2'-O-methyl adenosine

SEQ ID NO: 460 - RNA, 121 nt, synthetic construct; identical to SEQ ID NO: 458
  source 1..121: mol_type = other RNA
  modified_base 1: mod_base = OTHER; note = 2'-O-methyl uridine phosphorothioate
  modified_base 2: mod_base = OTHER; note = 2'-O-methyl adenosine phosphorothioate
  modified_base 3: mod_base = OTHER; note = 2'-O-methyl uridine phosphorothioate
  modified_base 4: mod_base = OTHER; note = 2'-O-methyl guanosine
  modified_base 5: mod_base = OTHER; note = 2'-O-methyl uridine
  modified_base 9: mod_base = OTHER; note = 2'-O-methyl adenosine
  modified_base 10: mod_base = OTHER; note = 2'-O-methyl guanosine
  modified_base 11: mod_base = OTHER; note = 2'-O-methyl cytidine
  modified_base 13: mod_base = OTHER; note = 2'-O-methyl uridine
  modified_base 18: mod_base = OTHER; note = 2'-O-methyl guanosine
  modified_base 22: mod_base = OTHER; note = 2'-O-methyl uridine
  modified_base 25: mod_base = OTHER; note = 2'-O-methyl guanosine
  modified_base 29: mod_base = OTHER; note = 2'-O-methyl uridine
  modified_base 30: mod_base = OTHER; note = 2'-O-methyl adenosine
  modified_base 31: mod_base = OTHER; note = 2'-O-methyl guanosine
  modified_base 32: mod_base = OTHER; note = 2'-O-methyl cytidine
  modified_base 37: mod_base = OTHER; note = 2'-O-methyl guanosine
  modified_base 38: mod_base = OTHER; note = 2'-O-methyl adenosine
  modified_base 39: mod_base = OTHER; note = 2'-O-methyl adenosine
  modified_base 40: mod_base = OTHER; note = 2'-O-methyl adenosine
  modified_base 60: mod_base = OTHER; note = 2'-O-methyl uridine
  modified_base 61: mod_base = OTHER; note = 2'-O-methyl cytidine
  modified_base 62: mod_base = OTHER; note = 2'-O-methyl uridine
  modified_base 63: mod_base = OTHER; note = 2'-O-methyl guanosine
  modified_base 64: mod_base = OTHER; note = 2'-O-methyl adenosine
  modified_base 65: mod_base = OTHER; note = 2'-O-methyl adenosine
  modified_base 66: mod_base = OTHER; note = 2'-O-methyl adenosine
  modified_base 67: mod_base = OTHER; note = 2'-O-methyl adenosine
  modified_base 68: mod_base = OTHER; note = 2'-O-methyl guanosine
  modified_base 89: mod_base = OTHER; note = 2'-O-methyl cytidine
  modified_base 90: mod_base = OTHER; note = 2'-O-methyl cytidine
  modified_base 91: mod_base = OTHER; note = 2'-O-methyl uridine
  modified_base 92: mod_base = OTHER; note = 2'-O-methyl uridine
  modified_base 93: mod_base = OTHER; note = 2'-O-methyl adenosine
  modified_base 94: mod_base = OTHER; note = 2'-O-methyl adenosine
  modified_base 95: mod_base = OTHER; note = 2'-O-methyl adenosine
  modified_base 96: mod_base = OTHER; note = 2'-O-methyl guanosine
  modified_base 97: mod_base = OTHER; note = 2'-O-methyl cytidine
  modified_base 98: mod_base = OTHER; note = 2'-O-methyl uridine
  modified_base 99: mod_base = OTHER; note = 2'-O-methyl cytidine
  modified_base 100: mod_base = OTHER; note = 2'-O-methyl cytidine
  modified_base 101: mod_base = OTHER; note = 2'-O-methyl uridine
  modified_base 102: mod_base = OTHER; note = 2'-O-methyl guanosine
  modified_base 103: mod_base = OTHER; note = 2'-O-methyl cytidine
  modified_base 104: mod_base = OTHER; note = 2'-O-methyl uridine
  modified_base 105: mod_base = OTHER; note = 2'-O-methyl uridine
  modified_base 106: mod_base = OTHER; note = 2'-O-methyl uridine
  modified_base 107: mod_base = OTHER; note = 2'-O-methyl adenosine
  modified_base 108: mod_base = OTHER; note = 2'-O-methyl adenosine
  modified_base 109: mod_base = OTHER; note = 2'-O-methyl guanosine
  modified_base 110: mod_base = OTHER; note = 2'-O-methyl guanosine
  modified_base 116: mod_base = OTHER; note = 2'-O-methyl cytidine
  modified_base 117: mod_base = OTHER; note = 2'-O-methyl guanosine
  modified_base 118: mod_base = OTHER; note = 2'-O-methyl uridine phosphorothioate
  modified_base 119: mod_base = OTHER; note = 2'-O-methyl uridine phosphorothioate
  modified_base 120: mod_base = OTHER; note = 2'-O-methyl uridine phosphorothioate
  modified_base 121: mod_base = OTHER; note = 2'-O-methyl adenosine

SEQ ID NO: 461 - RNA, 121 nt, synthetic construct; identical to SEQ ID NO: 458
  source 1..121: mol_type = other RNA
  modified_base 1: mod_base = OTHER; note = 2'-O-methyl uridine phosphorothioate
  modified_base 2: mod_base = OTHER; note = 2'-O-methyl adenosine phosphorothioate
  modified_base 3: mod_base = OTHER; note = 2'-O-methyl uridine phosphorothioate
  modified_base 4: mod_base = OTHER; note = 2'-O-methyl guanosine
  modified_base 5: mod_base = OTHER; note = 2'-O-methyl uridine
  modified_base 6: mod_base = OTHER; note = 2'-O-methyl uridine
  modified_base 7: mod_base = OTHER; note = 2'-O-methyl cytidine
  modified_base 8: mod_base = OTHER; note = 2'-O-methyl cytidine
  modified_base 9: mod_base = OTHER; note = 2'-O-methyl adenosine
  modified_base 10: mod_base = OTHER; note = 2'-O-methyl guanosine
  modified_base 11: mod_base = OTHER; note = 2'-O-methyl cytidine
  modified_base 12: mod_base = OTHER; note = 2'-O-methyl uridine
  modified_base 13: mod_base = OTHER; note = 2'-O-methyl uridine
  modified_base 14: mod_base = OTHER; note = 2'-O-methyl cytidine
  modified_base 18: mod_base = OTHER; note = 2'-O-methyl guanosine
  modified_base 22: mod_base = OTHER; note = 2'-O-methyl uridine
  modified_base 25: mod_base = OTHER; note = 2'-O-methyl guanosine
  modified_base 29: mod_base = OTHER; note = 2'-O-methyl uridine
  modified_base 30: mod_base = OTHER; note = 2'-O-methyl adenosine
  modified_base 31: mod_base = OTHER; note = 2'-O-methyl guanosine
  modified_base 32: mod_base = OTHER; note = 2'-O-methyl cytidine
  modified_base 37: mod_base = OTHER; note = 2'-O-methyl guanosine
  modified_base 38: mod_base = OTHER; note = 2'-O-methyl adenosine
  modified_base 39: mod_base = OTHER; note = 2'-O-methyl adenosine
  modified_base 40: mod_base = OTHER; note = 2'-O-methyl adenosine
  modified_base 60: mod_base = OTHER; note = 2'-O-methyl uridine
  modified_base 61: mod_base = OTHER; note = 2'-O-methyl cytidine
  modified_base 62: mod_base = OTHER; note = 2'-O-methyl uridine
  modified_base 63: mod_base = OTHER; note = 2'-O-methyl guanosine
  modified_base 64: mod_base = OTHER; note = 2'-O-methyl adenosine
  modified_base 65: mod_base = OTHER; note = 2'-O-methyl adenosine
  modified_base 66: mod_base = OTHER; note = 2'-O-methyl adenosine
  modified_base 67: mod_base = OTHER; note = 2'-O-methyl adenosine
  modified_base 68: mod_base = OTHER; note = 2'-O-methyl guanosine
  modified_base 89: mod_base = OTHER; note = 2'-O-methyl cytidine
  modified_base 90: mod_base = OTHER; note = 2'-O-methyl cytidine
  modified_base 91: mod_base = OTHER; note = 2'-O-methyl uridine
  modified_base 92: mod_base = OTHER; note = 2'-O-methyl uridine
  modified_base 93: mod_base = OTHER; note = 2'-O-methyl adenosine
  modified_base 94: mod_base = OTHER; note = 2'-O-methyl adenosine
  modified_base 95: mod_base = OTHER; note = 2'-O-methyl adenosine
  modified_base 96: mod_base = OTHER; note = 2'-O-methyl guanosine
  modified_base 97: mod_base = OTHER; note = 2'-O-methyl cytidine
  modified_base 98: mod_base = OTHER; note = 2'-O-methyl uridine
  modified_base 99: mod_base = OTHER; note = 2'-O-methyl cytidine
  modified_base 100: mod_base = OTHER; note = 2'-O-methyl cytidine
  modified_base 101: mod_base = OTHER; note = 2'-O-methyl uridine
  modified_base 102: mod_base = OTHER; note = 2'-O-methyl guanosine
  modified_base 103: mod_base = OTHER; note = 2'-O-methyl cytidine
  modified_base 104: mod_base = OTHER; note = 2'-O-methyl uridine
  modified_base 105: mod_base = OTHER; note = 2'-O-methyl uridine
  modified_base 106: mod_base = OTHER; note = 2'-O-methyl uridine
  modified_base 107: mod_base = OTHER; note = 2'-O-methyl adenosine
  modified_base 108: mod_base = OTHER; note = 2'-O-methyl adenosine
  modified_base 109: mod_base = OTHER; note = 2'-O-methyl guanosine
  modified_base 110: mod_base = OTHER; note = 2'-O-methyl guanosine
  modified_base 116: mod_base = OTHER; note = 2'-O-methyl cytidine
  modified_base 117: mod_base = OTHER; note = 2'-O-methyl guanosine
  modified_base 118: mod_base = OTHER; note = 2'-O-methyl uridine phosphorothioate
  modified_base 119: mod_base = OTHER; note = 2'-O-methyl uridine phosphorothioate
  modified_base 120: mod_base = OTHER; note = 2'-O-methyl uridine phosphorothioate
  modified_base 121: mod_base = OTHER; note = 2'-O-methyl adenosine

SEQ ID NO: 462 - RNA, 121 nt, synthetic construct
  source 1..121: mol_type = other RNA
  modified_base 1: mod_base = OTHER; note = 2'-O-methyl guanosine phosphorothioate
  modified_base 2: mod_base = OTHER; note = 2'-O-methyl adenosine phosphorothioate
  modified_base 3: mod_base = OTHER; note = 2'-O-methyl guanosine phosphorothioate
  modified_base 119: mod_base = OTHER; note = 2'-O-methyl uridine phosphorothioate
  modified_base 120: mod_base = OTHER; note = 2'-O-methyl uridine phosphorothioate
  modified_base 121: mod_base = OTHER; note = 2'-O-methyl adenosine
gaggcaagagggcggctttgggcggttgtagctcccgaaacgttgctacaataaggccgtctgaaaagatgtgccgcaacgctctgccccttaaagctcctgctttaaggggcatcgttta

SEQ ID NO: 463 - RNA, 121 nt, synthetic construct; identical to SEQ ID NO: 462
  source 1..121: mol_type = other RNA
  modified_base 1: mod_base = OTHER; note = 2'-O-methyl guanosine phosphorothioate
  modified_base 2: mod_base = OTHER; note = 2'-O-methyl adenosine phosphorothioate
  modified_base 3: mod_base = OTHER; note = 2'-O-methyl guanosine phosphorothioate
  modified_base 4: mod_base = OTHER; note = 2'-O-methyl guanosine
  modified_base 5: mod_base = OTHER; note = 2'-O-methyl cytidine
  modified_base 37: mod_base = OTHER; note = 2'-O-methyl guanosine
  modified_base 38: mod_base = OTHER; note = 2'-O-methyl adenosine
  modified_base 39: mod_base = OTHER; note = 2'-O-methyl adenosine
  modified_base 40: mod_base = OTHER; note = 2'-O-methyl adenosine
  modified_base 60: mod_base = OTHER; note = 2'-O-methyl uridine
  modified_base 61: mod_base = OTHER; note = 2'-O-methyl cytidine
  modified_base 62: mod_base = OTHER; note = 2'-O-methyl uridine
  modified_base 63: mod_base = OTHER; note = 2'-O-methyl guanosine
  modified_base 64: mod_base = OTHER; note = 2'-O-methyl adenosine
  modified_base 65: mod_base = OTHER; note = 2'-O-methyl adenosine
  modified_base 66: mod_base = OTHER; note = 2'-O-methyl adenosine
  modified_base 67: mod_base = OTHER; note = 2'-O-methyl adenosine
  modified_base 68: mod_base = OTHER; note = 2'-O-methyl guanosine
  modified_base 89: mod_base = OTHER; note = 2'-O-methyl cytidine
  modified_base 90: mod_base = OTHER; note = 2'-O-methyl cytidine
  modified_base 91: mod_base = OTHER; note = 2'-O-methyl uridine
  modified_base 92: mod_base = OTHER; note = 2'-O-methyl uridine
  modified_base 93: mod_base = OTHER; note = 2'-O-methyl adenosine
  modified_base 94: mod_base = OTHER; note = 2'-O-methyl adenosine
  modified_base 95: mod_base = OTHER; note = 2'-O-methyl adenosine
  modified_base 96: mod_base = OTHER; note = 2'-O-methyl guanosine
  modified_base 97: mod_base = OTHER; note = 2'-O-methyl cytidine
  modified_base 98: mod_base = OTHER; note = 2'-O-methyl uridine
  modified_base 99: mod_base = OTHER; note = 2'-O-methyl cytidine
  modified_base 100: mod_base = OTHER; note = 2'-O-methyl cytidine
  modified_base 101: mod_base = OTHER; note = 2'-O-methyl uridine
  modified_base 102: mod_base = OTHER; note = 2'-O-methyl guanosine
  modified_base 103: mod_base = OTHER; note = 2'-O-methyl cytidine
  modified_base 104: mod_base = OTHER; note = 2'-O-methyl uridine
  modified_base 105: mod_base = OTHER; note = 2'-O-methyl uridine
  modified_base 106: mod_base = OTHER; note = 2'-O-methyl uridine
  modified_base 107: mod_base = OTHER; note = 2'-O-methyl adenosine
  modified_base 108: mod_base = OTHER; note = 2'-O-methyl adenosine
  modified_base 109: mod_base = OTHER; note = 2'-O-methyl guanosine
  modified_base 110: mod_base = OTHER; note = 2'-O-methyl guanosine
  modified_base 116: mod_base = OTHER; note = 2'-O-methyl cytidine
  modified_base 117: mod_base = OTHER; note = 2'-O-methyl guanosine
  modified_base 118: mod_base = OTHER; note = 2'-O-methyl uridine phosphorothioate
  modified_base 119: mod_base = OTHER; note = 2'-O-methyl uridine phosphorothioate
  modified_base 120: mod_base = OTHER; note = 2'-O-methyl uridine phosphorothioate
  modified_base 121: mod_base = OTHER; note = 2'-O-methyl adenosine

SEQ ID NO: 464 - RNA, 121 nt, synthetic construct; identical to SEQ ID NO: 462
  source 1..121: mol_type = other RNA
  modified_base 1: mod_base = OTHER; note = 2'-O-methyl guanosine phosphorothioate
  modified_base 2: mod_base = OTHER; note = 2'-O-methyl adenosine phosphorothioate
  modified_base 3: mod_base = OTHER; note = 2'-O-methyl guanosine phosphorothioate
  modified_base 4: mod_base = OTHER; note = 2'-O-methyl guanosine
  modified_base 5: mod_base = OTHER; note = 2'-O-methyl cytidine
  modified_base 9: mod_base = OTHER; note = 2'-O-methyl adenosine
  modified_base 10: mod_base = OTHER; note = 2'-O-methyl guanosine
  modified_base 11: mod_base = OTHER; note = 2'-O-methyl guanosine
  modified_base 13: mod_base = OTHER; note = 2'-O-methyl cytidine
  modified_base 18: mod_base = OTHER; note = 2'-O-methyl uridine
  modified_base 22: mod_base = OTHER; note = 2'-O-methyl guanosine
  modified_base 25: mod_base = OTHER; note = 2'-O-methyl guanosine
  modified_base 29: mod_base = OTHER; note = 2'-O-methyl uridine
  modified_base 30: mod_base = OTHER; note = 2'-O-methyl adenosine
  modified_base 31: mod_base = OTHER; note = 2'-O-methyl guanosine
  modified_base 32: mod_base = OTHER; note = 2'-O-methyl cytidine
  modified_base 37: mod_base = OTHER; note = 2'-O-methyl guanosine
  modified_base 38: mod_base = OTHER; note = 2'-O-methyl adenosine
  modified_base 39: mod_base = OTHER; note = 2'-O-methyl adenosine
  modified_base 40: mod_base = OTHER; note = 2'-O-methyl adenosine
  modified_base 60: mod_base = OTHER; note = 2'-O-methyl uridine
  modified_base 61: mod_base = OTHER; note = 2'-O-methyl cytidine
  modified_base 62: mod_base = OTHER; note = 2'-O-methyl uridine
  modified_base 63: mod_base = OTHER; note = 2'-O-methyl guanosine
  modified_base 64: mod_base = OTHER; note = 2'-O-methyl adenosine
  modified_base 65: mod_base = OTHER; note = 2'-O-methyl adenosine
  modified_base 66: mod_base = OTHER; note = 2'-O-methyl adenosine
  modified_base 67: mod_base = OTHER; note = 2'-O-methyl adenosine
  modified_base 68: mod_base = OTHER; note = 2'-O-methyl guanosine
  modified_base 89: mod_base = OTHER; note = 2'-O-methyl cytidine
  modified_base 90: mod_base = OTHER; note = 2'-O-methyl cytidine
  modified_base 91: mod_base = OTHER; note = 2'-O-methyl uridine
  modified_base 92: mod_base = OTHER; note = 2'-O-methyl uridine
  modified_base 93: mod_base = OTHER; note = 2'-O-methyl adenosine
  modified_base 94: mod_base = OTHER; note = 2'-O-methyl adenosine
  modified_base 95: mod_base = OTHER; note = 2'-O-methyl adenosine
  modified_base 96: mod_base = OTHER; note = 2'-O-methyl guanosine
  modified_base 97: mod_base = OTHER; note = 2'-O-methyl cytidine
  modified_base 98: mod_base = OTHER; note = 2'-O-methyl uridine
  modified_base 99: mod_base = OTHER; note = 2'-O-methyl cytidine
  modified_base 100: mod_base = OTHER; note = 2'-O-methyl cytidine
  modified_base 101: mod_base = OTHER; note = 2'-O-methyl uridine
  modified_base 102: mod_base = OTHER; note = 2'-O-methyl guanosine
  modified_base 103: mod_base = OTHER; note = 2'-O-methyl cytidine
  modified_base 104: mod_base = OTHER; note = 2'-O-methyl uridine
  modified_base 105: mod_base = OTHER; note = 2'-O-methyl uridine
  modified_base 106: mod_base = OTHER; note = 2'-O-methyl uridine
  modified_base 107: mod_base = OTHER; note = 2'-O-methyl adenosine
  modified_base 108: mod_base = OTHER; note = 2'-O-methyl adenosine
  modified_base 109: mod_base = OTHER; note = 2'-O-methyl guanosine
  modified_base 110: mod_base = OTHER; note = 2'-O-methyl guanosine
  modified_base 116: mod_base = OTHER; note = 2'-O-methyl cytidine
  modified_base 117: mod_base = OTHER; note = 2'-O-methyl guanosine
  modified_base 118: mod_base = OTHER; note = 2'-O-methyl uridine phosphorothioate
  modified_base 119: mod_base = OTHER; note = 2'-O-methyl uridine phosphorothioate
  modified_base 120: mod_base = OTHER; note = 2'-O-methyl uridine phosphorothioate
  modified_base 121: mod_base = OTHER; note = 2'-O-methyl adenosine

SEQ ID NO: 465 - RNA, 121 nt, synthetic construct; identical to SEQ ID NO: 462
  source 1..121: mol_type = other RNA
  modified_base 1: mod_base = OTHER; note = 2'-O-methyl guanosine phosphorothioate
  modified_base 2: mod_base = OTHER; note = 2'-O-methyl adenosine phosphorothioate
  modified_base 3: mod_base = OTHER; note = 2'-O-methyl guanosine phosphorothioate
  modified_base 4: mod_base = OTHER; note = 2'-O-methyl guanosine
  modified_base 5: mod_base = OTHER; note = 2'-O-methyl cytidine
  modified_base 6: mod_base = OTHER; note = 2'-O-methyl adenosine
  modified_base 7: mod_base = OTHER; note = 2'-O-methyl adenosine
  modified_base 8: mod_base = OTHER; note = 2'-O-methyl guanosine
  modified_base 9: mod_base = OTHER; note = 2'-O-methyl adenosine
  modified_base 10: mod_base = OTHER; note = 2'-O-methyl guanosine
  modified_base 11: mod_base = OTHER; note = 2'-O-methyl guanosine
  modified_base 12: mod_base = OTHER; note = 2'-O-methyl guanosine
  modified_base 13: mod_base = OTHER; note = 2'-O-methyl cytidine
  modified_base 14: mod_base = OTHER; note = 2'-O-methyl guanosine
  modified_base 18: mod_base = OTHER; note = 2'-O-methyl uridine
  modified_base 22: mod_base = OTHER; note = 2'-O-methyl guanosine
  modified_base 25: mod_base = OTHER; note = 2'-O-methyl guanosine
  modified_base 29: mod_base = OTHER; note = 2'-O-methyl uridine
  modified_base 30: mod_base = OTHER; note = 2'-O-methyl adenosine
  modified_base 31: mod_base = OTHER; note = 2'-O-methyl guanosine
  modified_base 32: mod_base = OTHER; note = 2'-O-methyl cytidine
  modified_base 37: mod_base = OTHER; note = 2'-O-methyl guanosine
  modified_base 38: mod_base = OTHER; note = 2'-O-methyl adenosine
  modified_base 39: mod_base = OTHER; note = 2'-O-methyl adenosine
  modified_base 40: mod_base = OTHER; note = 2'-O-methyl adenosine
  modified_base 60: mod_base = OTHER; note = 2'-O-methyl uridine
  modified_base 61: mod_base = OTHER; note = 2'-O-methyl cytidine
  modified_base 62: mod_base = OTHER; note = 2'-O-methyl uridine
  modified_base 63: mod_base = OTHER; note = 2'-O-methyl guanosine
  modified_base 64: mod_base = OTHER; note = 2'-O-methyl adenosine
  modified_base 65: mod_base = OTHER; note = 2'-O-methyl adenosine
  modified_base 66: mod_base = OTHER; note = 2'-O-methyl adenosine
  modified_base 67: mod_base = OTHER; note = 2'-O-methyl adenosine
  modified_base 68: mod_base = OTHER; note = 2'-O-methyl guanosine
  modified_base 89: mod_base = OTHER; note = 2'-O-methyl cytidine
  modified_base 90: mod_base = OTHER; note = 2'-O-methyl cytidine
  modified_base 91: mod_base = OTHER; note = 2'-O-methyl uridine
  modified_base 92: mod_base = OTHER; note = 2'-O-methyl uridine
  modified_base 93: mod_base = OTHER; note = 2'-O-methyl adenosine
  modified_base 94: mod_base = OTHER; note = 2'-O-methyl adenosine
  modified_base 95: mod_base = OTHER; note = 2'-O-methyl adenosine
  modified_base 96: mod_base = OTHER; note = 2'-O-methyl guanosine
  modified_base 97: mod_base = OTHER; note = 2'-O-methyl cytidine
  modified_base 98: mod_base = OTHER; note = 2'-O-methyl uridine
  modified_base 99: mod_base = OTHER; note = 2'-O-methyl cytidine
  modified_base 100: mod_base = OTHER; note = 2'-O-methyl cytidine
  modified_base 101: mod_base = OTHER; note = 2'-O-methyl uridine
  modified_base 102: mod_base = OTHER; note = 2'-O-methyl guanosine
  modified_base 103: mod_base = OTHER; note = 2'-O-methyl cytidine
  modified_base 104: mod_base = OTHER; note = 2'-O-methyl uridine
  modified_base 105: mod_base = OTHER; note = 2'-O-methyl uridine
  modified_base 106: mod_base = OTHER; note = 2'-O-methyl uridine
  modified_base 107: mod_base = OTHER; note = 2'-O-methyl adenosine
  modified_base 108: mod_base = OTHER; note = 2'-O-methyl adenosine
  modified_base 109: mod_base = OTHER; note = 2'-O-methyl guanosine
  modified_base 110: mod_base = OTHER; note = 2'-O-methyl guanosine
  modified_base 116: mod_base = OTHER; note = 2'-O-methyl cytidine
  modified_base 117: mod_base = OTHER; note = 2'-O-methyl guanosine
  modified_base 118: mod_base = OTHER; note = 2'-O-methyl uridine phosphorothioate
  modified_base 119: mod_base = OTHER; note = 2'-O-methyl uridine phosphorothioate
  modified_base 120: mod_base = OTHER; note = 2'-O-methyl uridine phosphorothioate
  modified_base 121: mod_base = OTHER; note = 2'-O-methyl adenosine
